(19) United States
(12) Patent Application Publication
(10) Pub. No.: US 2009/0023149 A1
(43) Pub. Date: Jan. 22, 2009

(54) Methods, kits and devices for identifying biomarkers of treatment response and use thereof to predict treatment efficacy

(76) Inventor: Steen Knudsen, Birkroed (DK)

Correspondence Address: CLARK & ELBING LLP, 101 FEDERAL STREET, BOSTON, MA, 02110, US

(21) Appl. No.: 12/151,949

(22) Filed: May 9, 2008

Related U.S. Application Data
(63) Continuation-in-part of application No. PCT/IB2006/004048, filed on Dec. 1, 2006.

(30) Foreign Application Priority Data
Dec. 1, 2005 (DK) PA2005/01696
May 11, 2007 (DK) PA2007/00714
Jul. 11, 2007 (DK) PA2007/01023

(51) Int. Cl. C12Q 1/68

(52) U.S. Cl. 435/6

(57) ABSTRACT

The present invention features methods, kits, and devices for predicting the sensitivity of a patient to a compound or medical treatment. The invention also features methods for identifying gene biomarkers whose expression correlates to treatment sensitivity or resistance within a patient population or subpopulation.

### FIELD OF THE INVENTION

[0001] The invention features methods, kits, and devices for identifying biomarkers of patient sensitivity to medical treatments, e.g., sensitivity to chemotherapeutic agents, and predicting treatment efficacy using the biomarkers.

### BACKGROUND OF THE INVENTION

[0002] DNA microarrays have been used to measure gene expression in tumor samples from patients and to facilitate diagnosis. Gene expression can reveal the presence of cancer in a patient, its type, stage, and origin, and whether genetic mutations are involved. Gene expression may even have a role in predicting the efficacy of chemotherapy. Over recent decades, the National Cancer Institute (NCI) has tested compounds, including chemotherapy agents, for their effect in limiting the growth of 60 human cancer cell lines. The NCI has also measured gene expression in these 60 cancer cell lines using DNA microarrays. Various studies have explored the relationship between gene expression and compound effect using the NCI datasets. Critical time is often lost due to a trial and error approach to finding an effective chemotherapy for patients with cancer. In addition, cancer cells often develop resistance to a previously effective therapy. In such situations, patient outcome could be greatly improved by early detection of such resistance.

[0003] There remains a need for proven methods and devices that predict the sensitivity or resistance of cancer patients to a medical treatment.

### SUMMARY OF THE INVENTION

[0004] The invention features methods, kits, and devices for determining the sensitivity or resistance of a patient, e.g., a cancer patient, to a treatment, e.g., treatment with a compound, such as a chemotherapeutic agent, or radiation. In particular, the methods, kits, and devices can be used to determine the sensitivity or resistance of a cancer patient to any medical treatment, including, e.g., treatment with a compound, drug, or radiation. The methods, kits, and devices of the invention have been used to accurately determine treatment efficacy in cancer patients (e.g., patients with lung, lymphoma, and brain cancer) and can be used to determine treatment efficacy in patients diagnosed with any cancer.

[0005] Methods, kits, and devices for detecting the level of expression of biomarkers (e.g., genes and microRNAs) that indicate sensitivity or resistance to radiation therapy or the chemotherapy agents Vincristine, Cisplatin, Azaguanine, Etoposide, Adriamycin, Aclarubicin, Mitoxantrone, Mitomycin, Paclitaxel, Gemcitabine, Taxotere, Dexamethasone, Ara-C, Methylprednisolone, Methotrexate, Bleomycin, Methyl-GAG, Carboplatin, 5-FU (5-Fluorouracil), Rituximab, PXD101, (a histone deacetylase (HDAC) inhibitor), 5-Aza-2′-deoxycytidine (Decitabine), Melphalan, IL4-PE38 fusion protein, IL13-PE38QQR fusion protein (cintredekin besudotox), Valproic acid (VPA), All-trans retinoic acid (ATRA), Cytoxan, Topotecan (Hycamtin), Suberoylanilide hydroxamic acid (SAHA, vorinostat, Zolinza), Depsipeptide (FR901229), Bortezomib, Leukeran, Fludarabine, Vinblastine, Busulfan, Dacarbazine, Oxaliplatin, Hydroxyurea, Tegafur, Daunorubicin, Bleomycin, Estramustine, Chlorambucil, Mechlorethamine, Streptozocin, Carmustine, Lomustine, Mercaptopurine, Teniposide, Dactinomycin, Tretinoin, Sunitinib, SPC2996, Ifosfamide, Tamoxifen, Floxuridine, Irinotecan, and Satraplatin are also provided. The methods, kits, and devices can be used to predict the sensitivity or resistance of a subject (e.g., a cancer patient) diagnosed with a disease condition, e.g., cancer (e.g., cancers of the breast, prostate, lung and bronchus, colon and rectum, urinary bladder, skin, kidney, pancreas, oral cavity and pharynx, ovary, thyroid, parathyroid, stomach, brain, esophagus, liver and intrahepatic bile duct, cervix larynx, heart, testis, small and large intestine, anus, anal canal and anorectum, vulva, gallbladder, pleura, bones and joints, hypopharynx, eye and orbit, nose, nasal cavity and middle ear, nasopharynx, ureter, peritoneum, omentum and mesentery, or gastrointestines, as well as any form of cancer including, e.g., chronic myeloid leukemia, acute lymphocytic leukemia, non-Hodgkin's lymphoma, melanoma, carcinoma, basal cell carcinoma, malignant mesothelioma, neuroblastoma, multiple myeloma, leukemia, retinoblastoma, acute myeloid leukemia, chronic lymphocytic leukemia, Hodgkin's lymphoma, carcinoid tumors, acute tumor, or soft tissue sarcoma) to a treatment, e.g., treatment with a compound or drug, e.g., a chemotherapeutic agent, or radiation.

[0006] In a first aspect, the invention features a method of determining sensitivity of a cancer in a patient to a treatment for cancer by measuring the level of expression of at least one gene in a cell (e.g., a cancer cell) of the patient, in which the gene is selected from the group consisting of ACTB, ACTN4, ADA, ADAM9, ADAMTS1, ADD1, AF1Q, AIF1, AKAP1, AKAP13, AKR1C1, AKT1, ALDH2, ALDOC, ALG5, ALMS1, ALOX15B, AMIGO2, AMPD2, AMPD3, ANAPC5, ANP32A, ANP32B, ANXA1, AP1G2, APOBEC3B, APRT, ARHE, ARHGAP15, ARHGAP25, ARHGDIB, ARHGEF6, ARL7, ASAH1, ASPH, ATF3, ATIC, ATP2A2, ATP2A3, ATP5D, ATP5G2, ATP6V1B2, BC008967, BCAT1, BCHE, BCL11B, BDNF, BHLHB2, BIN2, BLMH, BMI1, BNIP3, BRDT, BRRN1, BTN3A3, C11orf2, C14orf139, C15orf25, C18orf10, C1orf24, C1orf29, C1orf38, C1QR1, C22orf18, C6orf32, CACNA1G, CACNB3, CALM1, CALML4, CALU, CAP350, CASP2, CASP6, CASP7, CAST, CBLB, CCNA2, CCNB1IP1, CCND3, CCR7, CCR9, CD1A, CD1C, CD1D, CD1E, CD2, CD28, CD3D, CD3E, CD3G, CD3Z, CD44, CD47, CD59, CD6, CD63, CD8A, CD8B1, CD99, CDC10, CDCl₄B, CDH11, CDH2, CDKL5, CDKN2A, CDW52, CECR1, CENPB, CENTB1, CENTG2, CEP1, CG018, CHRNA3, CHS1, CIAPIN1, CKAP4, CKIP-1, CNP, COL4A1, COL5A2, COL6A1, CORO1C, CRABP1, CRK, CRY1, CSDA, CTBP1, CTSC, CTSL, CUGBP2, CUTC, CXCL1, CXCR4, CXorf9, CYFIP2, CYLD, CYR61, DATF1, DAZAP1, DBN1, DBT, DCTN1, DDX18, DDX5, DGKA, DIAPH1, DKC1, DKFZP434J154, DKFZP564C186, DKFZP564G2022, DKFZp564J157, DKFZP564K0822, DNAJC10, DNAJC7, DNAPTP6, DOCK10, DOCK2, DPAGT1, DPEP2, DPYSL3, DSIPI, DUSP1, DXS9879E, EEF1B2, EFNB2, EHD2, EIF5A, ELK3, ENO2, EPAS1, EPB41L4B, ERCC2, ERG, ERP70, EVER1, EVI2A, EVL, EXT1, EZH2, F2R, FABP5, FAD104, FAM46A, FAU, FCGR2A, FCGR2C, FER1L3, FHL1, FHOD1, FKBP1A, FKBP9, FLJ10350, FLJ10539, FLJ10774, FLJ12270, FLJ13373, FLJ20859, FLJ21159, FLJ22457, FLJ35036, FLJ46603, FLNC, FLOT1, FMNL1, FNBP1, FOLH1, FOXF2, FSCN1, FTL, FYB, FYN, GOS2, G6PD, GALIG, GALNT6, GATA2, GATA3, GFPT1, GIMAP5, GIT2, GJA1, GLRB, GLTSCR2, GLUL, GMDS, GNAQ, GNB2, GNB5, GOT2, GPR65, GPRASP1, GPSM3, GRP58, GSTM2, GTF3A, GTSE1, GZMA, GZMB, H1F0, H1FX, H2AFX, H3F3A, HA-1, HEXB, HIC, HIST1H4C, HK1, HLA-A, HLA-B, HLA-DRA, HMGA1, HMGN2, HMMR, HNRPA1, HNRPD, HNRPM, HOXA9, HRMT1L1, HSA9761, HSPA5, HSU79274, HTATSF1, ICAM1, ICAM2, IER3, IFI16, IFI44, IFITM2, IFITM3, IFRG28, IGFBP2, IGSF4, IL13RA2, IL21R, IL2RG, IL4R, IL6, IL6R, IL6ST, IL8, IMPDH2, INPP5D, INSIG1, IQGAP1, IQGAP2, IRS2, ITGA5, ITM2A, JARID2, JUNB, K-ALPHA-1, KHDRBS1, KIAA0355, KIAA0802, KIAA0877, KIAA0922, KIAA1078, KIAA1128, KIAA1393, KIFC1, LAIR1, LAMB1, LAMB3, LAT, LBR, LCK, LCP1, LCP2, LEF1, LEPRE1, LGALS1, LGALS9, LHFPL2, LNK, LOC54103, LOC55831, LOC81558, LOC94105, LONP, LOX, LOXL2, LPHN2, LPXN, LRMP, LRP12, LRRC5, LRRN3, LST1, LTB, LUM, LY9, LY96, MAGEB2, MAL, MAP1B, MAP1LC3B, MAP4K1, MAPK1, MARCKS, MAZ, MCAM, MCL1, MCM5, MCM7, MDH2, MDN1, MEF2C, MFNG, MGC17330, MGC21654, MGC2744, MGC4083, MGC8721, MGC8902, MGLL, MLPH, MPHOSPH6, MPP1, MPZL1, MRP63, MRPS2, MT1E, MT1K, MUF1, MVP, MYB, MYL9, MYO1B, NAP1L1, NAP1L2, NARF, NASP, NCOR2, NDN, NDUFAB1, NDUFS6, NFKBIA, NID2, NIPA2, NME4, NME7, NNMT, NOL5A, NOL8, NOMO2, NOTCH1, NPC1, NQO1, NR1D2, NUDC, NUP210, NUP88, NVL, NXF1, OBFC1, OCRL, OGT, OXA1L, P2RX5, P4HA1, PACAP, PAF53, PAFAH1B3, PALM2-AKAP2, PAX6, PCBP2, PCCB, PFDN5, PFN1, PFN2, PGAM1, PHEMX, PHLDA1, PIM2, PITPNC1, PLAC8, PLAGL1, PLAUR, PLCB1, PLEK2, PLEKHC1, PLOD2, PLSCR1, PNAS-4, PNMA2, POLR2F, PPAP2B, PRF1, PRG1, PRIM1, PRKCH, PRKCQ, PRKD2, PRNP, PRP19, PRPF8, PRSS23, PSCDBP, PSMB9, PSMC3, PSME2, PTGER4, PTGES2, PTOV1, PTP4A3, PTPN7, PTPNS1, PTRF, PURA, PWP1, PYGL, QKI, RAB3GAP, RAB7L1, RAB9P40, RAC2, RAFTLIN, RAG2, RAP1B, RASGRP2, RBPMS, RCN1, RFC3, RFC5, RGC32, RGS3, RHOH, RIMS3, RIOK3, RIPK2, RIS1, RNASE6, RNF144, RPL10, RPL10A, RPL12, RPL13A, RPL17, RPL18, RPL36A, RPLP0, RPLP2, RPS15, RPS19, RPS2, RPS4X, RPS4Y1, RRAS, RRAS2, RRBP1, RRM2, RUNX1, RUNX3, S100A4, SART3, SATB1, SCAP1, SCARB1, SCN3A, SEC31L2, SEC61G, SELL, SELPLG, SEMA4G, SEPT10, SEPT6, SERPINA1, SERPINB1, SERPINB6, SFRS5, SFRS6, SFRS7, SH2D1A, SH3GL3, SH3TC1, SHD1, SHMT2, SIAT1, SKB1, SKP2, SLA, SLC1A4, SLC20A1, SLC25A15, SLC25A5, SLC39A14, SLC39A6, SLC43A3, SLC4A2, SLC7A11, SLC7A6, SMAD3, SMOX, SNRPA, SNRPB, SOD2, SOX4, SP140, SPANXC, SPI1, SRF, SRM, SSA2, SSBP2, SSRP1, SSSCA1, STAG3, STAT1, STAT4, STAT5A, STC1, STC2, STOML2, T3JAM, TACC1, TACC3, TAF5, TAL1, TAP1, TARP, TBCA, TCF12, TCF4, TFDP2, TFPI, TIMM17A, TIMP1, TJP1, TK2, TM4SF1, TM4SF2, TM4SF8, TM6SF1, TMEM2, TMEM22, TMSB10, TMSNB, TNFAIP3, TNFAIP8, TNFRSF10B, TNFRSF1A, TNFRSF7, TNIK, TNPO1, TOB1, TOMM20, TOX, TPK1, TPM2, TRA@, TRA1, TRAM2, TRB@, TRD@, TRIM, TRIM14, TRIM22, TRIM28, TRIP13, TRPV2, TUBGCP3, TUSC3, TXN, TXNDC5, UBASH3A, UBE2A, UBE2L6, UBE2S, UCHL1, UCK2, UCP2, UFD1L, UGDH, ULK2, UMPS, UNG, USP34, USP4, VASP, VAV1, VLDLR, VWF, WASPIP, WBSCR20A, WBSCR20C, WHSC1, WNT5A, ZAP70, ZFP36L1, ZNF32, ZNF335, ZNF593, ZNFN1A1, and ZYX; in which change in the level of expression of the gene indicates the cell is sensitive or resistant to the treatment.

[0007] In an embodiment, the method further includes determining a patient's resistance or sensitivity to radiation therapy or the chemotherapy agents Vincristine, Cisplatin, Adriamycin, Etoposide, Azaguanine, Aclarubicin, Mitoxantrone, Paclitaxel, Mitomycin, Gemcitabine, Taxotere, Dexamethasone, Methylprednisolone, Ara-C, Methotrexate, Bleomycin, Methyl-GAG, Rituximab, PXD101 (a histone deacetylase (HDAC) inhibitor), 5-Aza-2′-deoxycytidine (Decitabine), Melphalan, IL4-PE38 fusion protein, IL13-PE38QQR fusion protein (cintredekin besudotox), Valproic acid (VPA), All-trans retinoic acid (ATRA), Cytoxan, Topotecan (Hycamtin), Suberoylanilide hydroxamic acid (SAHA, vorinostat, Zolinza), Depsipeptide (FR901229), Bortezomib, Leukeran, Fludarabine, Vinblastine, Busulfan, Dacarbazine, Oxaliplatin, Hydroxyurea, Tegafur, Daunorubicin, Bleomycin, Estramustine, Chlorambucil, Mechlorethamine, Streptozocin, Carmustine, Lomustine, Mercaptopurine, Teniposide, Dactinomycin, Tretinoin, Sunitinib, SPC2996, Ifosfamide, Tamoxifen, Floxuridine, frinotecan, and Satraplatin by measuring the level of expression of one or more of the genes known to change (e.g., to increase or decrease) in a patient sensitive to treatment with these agents (e.g., a patient is determined to be sensitive, or likely to be sensitive, to the indicated treatment if the level of expression of one or more of the gene(s) increases or decreases relative to the level of expression of the gene(s) in a control sample (e.g., a cell or tissue) in which increased or decreased expression of the gene(s) indicates sensitivity to the treatment, and vice versa). Alternatively, a patient's resistance or sensitivity to radiation therapy or any of the chemotherapy agents listed above can be determined by measuring the level of expression of at least one microRNA in a cell (e.g., a cancer cell) known to change (e.g., the level of expression is increased or decreased) in a patient sensitive to a treatment with these agents, in which the microRNA is selected from the group consisting of ath-MIR180aNo2, Hcd102 left, Hcd111 left, Hcd115 left, Hcd120 left, Hcd142 right, Hcd145 left, Hcd148_HPR225 left, Hcd181 left, Hcd181 right, Hcd210_HPR205 right, Hcd213_HPR182 left, Hcd230 left, Hcd243 right, Hcd246 right, Hcd248 right, Hcd249 right, Hcd250 left, Hcd255 left, Hcd257 left, Hcd257 right, Hcd263 left, Hcd266 left, Hcd270 right, Hcd279 left, Hcd279 right, Hcd28_HPR39left, Hcd28_HPR39right, Hcd282PO right, Hcd289 left, Hcd294 left, Hcd318 right, Hcd323 left, Hcd330 right, Hcd338 left, Hcd340 left, Hcd350 right, Hcd355_HPR190 left, Hcd361 right, Hcd366 left, Hcd373 right, Hcd383 left, Hcd383 right, Hcd384 left, Hcd397 left, Hcd404 left, Hcd412 left, Hcd413 right, Hcd415 right, Hcd417 right, Hcd421 right, Hcd425 left, Hcd438right, Hcd434 right, Hcd438 left, Hcd440_HPR257 right, Hcd444 right, Hcd447 right, Hcd448 left, Hcd498 right, Hcd503 left, Hcd511 right, Hcd512 left, Hcd514 right, Hcd517 left, Hcd517 right, Hcd530 right, Hcd536_HPR104 right, Hcd542 left, Hcd544 left, Hcd547 left, Hcd559 right, Hcd562 right, Hcd569 right, Hcd570 right, Hcd578 right, Hcd581 right, Hcd586 left, Hcd586 right, Hcd587 right, Hcd605 left, Hcd605 left, Hcd605 right, Hcd608 right, Hcd627 left, Hcd631 left, Hcd631 right, Hcd634 left, Hcd642 right, Hcd649 right, Hcd654 left, Hcd658 right, Hcd669 right, Hcd674 left, Hcd678 right, Hcd683 left, Hcd684 right, Hcd689 right, Hcd690 right, Hcd691 right, Hcd693 right, Hcd697 right, Hcd704 left, Hcd704 left, Hcd712 right, Hcd716 right, Hcd731 left, Hcd738 left, Hcd739 right, Hcd739 right, Hcd749 right, Hcd753 left, Hcd754 left, Hcd755 left, Hcd760 left, Hcd763 right, Hcd768 left, Hcd768 right, Hcd770 left, Hcd773 left, Hcd777 left, Hcd778 right, Hcd781 left, Hcd781 right, Hcd782 left, Hcd783 left, Hcd788 left, Hcd794 right, Hcd796 left, Hcd799 left, Hcd807 right, Hcd812 left, Hcd817 left, Hcd817 right, Hcd829 right, Hcd852 right, Hcd861 right, Hcd863PO right, Hcd866 right, Hcd869 left, Hcd873 left, Hcd886 right, Hcd889 right, Hcd891 right, Hcd892 left, Hcd913 right, Hcd923 left, Hcd923 right, Hcd938 left, Hcd938 right, Hcd939 right, Hcd946 left, Hcd948 right, Hcd960 left, Hcd965 left, Hcd970 left, Hcd975 left, Hcd976 right, Hcd99 right, HPR100 right, HPR129 left, HPR154 left, HPR159 left, HPR163 left, HPR169 right, HPR172 right, HPR181 left, HPR187 left, HPR199 right, HPR206 left, HPR213 right, HPR214 right, HPR220 left, HPR220 right, HPR227 right, HPR232 right, HPR233 right, HPR244 right, HPR262 left, HPR264 right, HPR266 right, HPR271 right, HPR76 right, hsa_mir_{—}490_Hcd20 right, HSHELA01, HSTRNL, HUMTRAB, HUMTRF, HUMTRN, HUMTRS, HUMTRV1A, let-7f-2-prec2, mir-001b-1-prec1, mir-001b-2-prec, mir-007-1-prec, mir-007-2-precNo2, mir-010a-precNo1, mir-015b-precNo2, mir-016a-chr13, mir-016b-chr3, mir-0,7-precNo1, mir-0,7-precNo2, mir-018-prec, mir-019a-prec, mir-019b-1-prec, mir-019b-2-prec, mir-020-prec, mir-022-prec, mir-023a-prec, mir-023b-prec, mir-024-2-prec, mir-025-prec, mir-027b-prec, mir-029c-prec, mir-032-precNo2, mir-033b-prec, mir-033-prec, mir-034-precNo1, mir-034-precNo2, mir-092-prec-13=092-1No2, mir-092-prec-X=092-2, mir-093-prec-7.1=093-1, mir-095-prec-4,mir-096-prec-7No1, mir-096-prec-7No2, mir-098-prec-X, mir-099b-prec-19No1, mir-100-1/2-prec, mir-100No1, mir-101-prec-9, mir-102-prec-1, mir-103-2-prec, mir-103-prec-5=103-1, mir-106aNo1, mir-106-prec-X, mir-107No1, mir-107-prec-10, mir-122a-prec, mir-123-precNo1, mir-123-precNo2, mir-124a-1-prec1, mir-124a-2-prec, mir-124a-3-prec, mir-125b-1, mir-125b-2-precNo2, mir-127-prec, mir-128b-precNo1, mir-128b-precNo2, mir-133a-1, mir-135-2-prec, mir-136-precNo2, mir-138-1-prec, mir-140No2, mir-142-prec, mir-143-prec, mir-144-precNo2, mir-145-prec, mir-146bNo1, mir-146-prec, mir-147-prec, mir-148aNo1, mir-148-prec, mir-149-prec, mir-150-prec, mir-153-1-prec1, mir-154-prec1No1, mir-155-prec, mir-15aNo1, mir-16-1No1, mir-16-2No1, mir-181a-precNo1, mir-181b-1No1, mir-181b-2No1, mir-181b-precNo1, mir-181b-precNo2, mir-181c-precNo1, mir-181dNo1, mir-188-prec, mir-18bNo2, mir-191-prec, mir-192No2, mir-193bNo2, mir-194-2No1, mir-195-prec, mir-196-2-precNo2, mir-197-prec, mir-198-prec, mir-199a-1-prec, mir-199a-2-prec, mir-199b-precNo1, mir-200a-prec, mir-200bNo1, mir-200bNo2, mir-202*, mir-202-prec, mir-204-precNo2, mir-205-prec, mir-208-prec, mir-20bNo1, mir-2,2-precNo1, mir-2,2-precNo2, mir-2,3-precNo1, mir-2,4-prec, mir-2,5-precNo2, mir-2,6-precNo1, mir-219-2No1, mir-2,9-prec, mir-223-prec, mir-29b-1No1, mir-29b-2=102prec7.1=7.2, mir-321No1, mir-321No2, mir-324No1, mir-324No2, mir-328No1, mir-342No1, mir-361No1, mir-367No1, mir-370No1, mir-371No1, miR-373*No1, mir-375, mir-376aNo1, mir-379No1, mir-380-5p, mir-382, mir-384, mir-409-3p, mir-423No1, mir-424No2, mir-429No1, mir-429No2, mir-4323p, mir-4325p, mir-449No1, mir-450-1, mir-450-2No1, mir-483No1, mir-484, mir-487No1, mir-495No1, mir-499No2, mir-501No2, mir-503No1, mir-509No1, mir-514-1No2, mir-515-15p, mir-515-23p, mir-516-33p, mir-516-43p, mir-518e/526c, mir-519a-1/52, mir-519a-2No2, mir-519b, mir-519c/52, mir-520c/52, mir-526a-2No1, mir-526a-2No2, MPR103 right, MPR121 left, MPR121 left, MPR130 left, MPR130 right, MPR133 right, MPR141 left, MPR151 left, MPR156 left, MPR162 left, MPR174 left, MPR174 right, MPR185 right, MPR197 right, MPR203 left, MPR207 right, MPR215 left, MPR216 left, MPR224 left, MPR224 right, MPR228 left, MPR234 right, MPR237 left, MPR243 left, MPR244 right, MPR249 left, MPR254 right, MPR74 left, MPR88 right, and MPR95 left.

[0008] In an embodiment, the method includes determining the expression of two of the listed genes or microRNAs, more preferably three, four, five, six, seven, eight, nine, or ten of the listed genes, and most preferably twenty, thirty, forty, fifty, sixty, seventy, eighty, ninety, or one hundred or more of the listed genes. In another embodiment, the change in the level of gene or microRNA expression (e.g., an increase or decrease) is determined relative to the level of gene or microRNA expression in a cell or tissue known to be sensitive to the treatment, such that a similar level of gene or microRNA expression exhibited by a cell or tissue of the patient indicates the patient is sensitive to the treatment. In another embodiment, the change in the level of gene or microRNA expression (e.g., an increase or decrease) is determined relative to the level of gene or microRNA expression in a cell or tissue known to be resistant to the treatment, such that a similar level of gene or microRNA expression exhibited by a cell or tissue of the patient indicates the patient is resistant to the treatment.

[0009] In a second aspect, the invention features a method of determining sensitivity of a cancer in a patient to a treatment for cancer by measuring the level of expression of at least one microRNA in a cell (e.g., a cancer cell) of the patient, in which the microRNA is selected from the group set forth in the first aspect of the invention. In an embodiment, the method further includes determining a patient's resistance or sensitivity to radiation therapy or any of the chemotherapy agents set forth in the first aspect of the invention by measuring the level of expression of one or more of the microRNAs known to change (e.g., to increase or decrease) in a patient sensitive to treatment with these agents (e.g., a patient is determined to be sensitive, or likely to be sensitive, to the indicated treatment if the level of expression of one or more of the microRNA(s) increases or decreases relative to the level of expression of the microRNA(s) in a control sample (e.g., a cell or tissue) in which increased or decreased expression of the microRNA(s) indicates sensitivity to the treatment, and vice versa). In an embodiment, the method includes determining the expression of two of the listed genes or microRNAs, more preferably three, four, five, six, seven, eight, nine, or ten of the listed genes, and most preferably twenty, thirty, forty, fifty, sixty, seventy, eighty, ninety, or one hundred or more of the listed genes. In another embodiment, the change in the level of microRNA expression (e.g., an increase or decrease) is determined relative to the level of microRNA expression in a cell or tissue known to be sensitive to the treatment, such that a similar level of microRNA expression exhibited by a cell or tissue of the patient indicates the patient is sensitive to the treatment. In another embodiment, the change in the level of microRNA expression (e.g., an increase or decrease) is determined relative to the level of microRNA expression in a cell or tissue known to be resistant to the treatment, such that a similar level of microRNA expression exhibited by a cell or tissue of the patient indicates the patient is resistant to the treatment.

[0010] In another embodiment, the invention features a method for determining the development of resistance by a patient (e.g., resistance of a cell, such as a cancer cell, in the patient) to a treatment to which the patient was previously sensitive. The method includes measuring the level of expression of one or more of the microRNAs set forth in the first aspect of the invention, such that the level of expression of a microRNA which is decreased in a cell or tissue known to be sensitive to the treatment indicates that the patient is resistant to or has a propensity to become resistant to the treatment. Alternatively, a decrease in the expression level of a microRNA which is increased in a cell or tissue known to be sensitive to the treatment indicates that the patient is resistant to or has a propensity to become resistant to the treatment.

[0011] In a third aspect, the invention features a kit that includes a single-stranded nucleic acid molecule (e.g., one or a plurality thereof; e.g., a deoxyribonucleic acid molecule or a ribonucleic acid molecule) that is substantially complementary to (e.g., that has at least 80%, 90%, 95% 97%, 99%, or 100% identical to the complement of) or that is substantially identical to (e.g., that has at least 80%, 90%, 95% 97%, 99%, or 100% identity to) at least 5 consecutive nucleotides (more preferably at least 10, 15, 20, 25, 30, 35, 40, 45, 50, 55, 60, 65, 70, 75, 80, 85, 90, 95, 100, 150, 200, 250, 300, or more consecutive nucleotides; the nucleic acid can also be 5-20, 25, 5-50, 50-100, or over 100 consecutive nucleotides long) of at least one of the genes (e.g., at least 2, 3, 4, 5, 6, 7, 8, 9, 10, 20, 30, 40, 50, 60, 70, 80, 90, 100, or more of the genes) set forth in the first aspect of the invention, such that the single-stranded nucleic acid molecule is sufficient for measuring the level of expression of the gene(s) by allowing specific hybridization between the single-stranded nucleic acid molecule and a nucleic acid molecule encoded by the gene, or a complement thereof. Alternatively, the kit includes one or more single-stranded nucleic acid molecules that are substantially complementary to or substantially identical to at least 5 consecutive nucleotides of at least one of the microRNAs set forth in the first aspect of the invention, such that the single-stranded nucleic acid molecule is sufficient for measuring the level of expression of the microRNA(s) by allowing specific hybridization between the single-stranded nucleic acid molecule and the microRNA, or a complement thereof. The kit further includes instructions for applying nucleic acid molecules collected from a sample from a cancer patient (e.g., from a cell of the patient), determining the level of expression of the gene(s) or microRNA(s) hybridized to the single-stranded nucleic acid, and determining the patient's sensitivity to a treatment for cancer when use of the kit indicates that the level of expression of the gene(s) or microRNA(s) changes (e.g., increases or decreases relative to a control sample (e.g., tissue or cell) known to be sensitive or resistant to the treatment, as is discussed above in connection with the first aspect of the invention). In an embodiment, the instructions further indicate that a change in the level of expression of the gene(s) or microRNA(s) relative to the expression of the gene(s) or microRNA(s) in a control sample (e.g., a cell or tissue known to be sensitive or resistant to the treatment) indicates a change in sensitivity of the patient to the treatment (e.g., a decrease in the level of expression of a gene or microRNA known to be expressed in cells sensitive to the treatment indicates that the patient is becoming resistant to the treatment or is likely to become resistant to the treatment, and vice versa).

[0012] In another embodiment, the kit can be utilized to determine a patient's resistance or sensitivity to radiation therapy or the chemotherapy agents Vincristine, Cisplatin, Adriamycin, Etoposide, Azaguanine, Aclarubicin, Mitoxantrone, Paclitaxel, Mitomycin, Gemcitabine, Taxotere, Dexamethasone, Methylprednisolone, Ara-C, Methotrexate, Bleomycin, Methyl-GAG, Rituximab, PXD101 (a histone deacetylase (HDAC) inhibitor), 5-Aza-2′-deoxycytidine (Decitabine), Melphalan, IL4-PE38 fusion protein, IL13-PE38QQR fusion protein (cintredekin besudotox), Valproic acid (VPA), All-trans retinoic acid (ATRA), Cytoxan, Topotecan (Hycamtin), Suberoylanilide hydroxamic acid (SAHA, vorinostat, Zolinza), Depsipeptide (FR901229), Bortezomib, Leukeran, Fludarabine, Vinblastine, Busulfan, Dacarbazine, Oxaliplatin, Hydroxyurea, Tegafur, Daunorubicin, Bleomycin, Estramustine, Chlorambucil, Mechlorethamine, Streptozocin, Carmustine, Lomustine, Mercaptopurine, Teniposide, Dactinomycin, Tretinoin, Sunitinib, SPC2996, Ifosfamide, Tamoxifen, Floxuridine, Irinotecan, and Satraplatin by measuring the level of expression of one or more of the genes or microRNAs set forth in the first aspect of the invention and known to change (e.g., to increase or decrease) in a patient sensitive to treatment with these agents (e.g., a patient is determined to be sensitive, or likely to be sensitive, to the indicated treatment if the level of expression of one or more of the gene(s) or microRNA(s) increases or decreases relative to the level of expression of the gene(s) or microRNA(s) in a control sample (e.g., a cell or tissue) in which increased or decreased expression of the gene(s) or microRNA(s) indicates sensitivity to the treatment, and vice versa).

[0013] In another embodiment, the nucleic acid molecules are characterized by their ability to specifically identify nucleic acid molecules complementary to the genes or microRNAs in a sample collected from a cancer patient.

[0014] In a fourth aspect, the invention features a kit that includes a single-stranded nucleic acid molecule (e.g., one or a plurality thereof; e.g., a deoxyribonucleic acid molecule or a ribonucleic acid molecule) that is substantially complementary to (e.g., that has at least 80%, 90%, 95% 97%, 99%, or 100% identical to the complement of) or that is substantially identical to (e.g., that has at least 80%, 90%, 95% 97%, 99%, or 100% identity to) at least 5 consecutive nucleotides (more preferably at least 10, 15, 20, 25, 30, 35, 40, 45, 50, 55, 60, 65, 70, 75, 80, 85, 90, 95, 100, 150, 200, 250, 300, or more consecutive nucleotides; the nucleic acid can also be 5-20, 25, 5-50, 50-100, or over 100 consecutive nucleotides long) of at least one of the microRNAs (e.g., at least 2, 3, 4, 5, 6, 7, 8, 9, 10, 20, 30, 40, 50, 60, 70, 80, 90, 100, or more of the microRNAs) set forth in the first aspect of the invention, such that the single-stranded nucleic acid molecule is sufficient for measuring the level of expression of the microRNA(s) by allowing specific hybridization between the single-stranded nucleic acid molecule and a microRNA, or a complement thereof. The kit further includes instructions for applying nucleic acid molecules collected from a sample from a cancer patient (e.g., from a cell of the patient), determining the level of expression of the microRNA(s) hybridized to the single-stranded nucleic acid, and determining the patient's sensitivity to a treatment for cancer when use of the kit indicates that the level of expression of microRNA(s) changes (e.g., increases or decreases relative to a control sample (e.g., tissue or cell) known to be sensitive or resistant to the treatment, as is discussed above in connection with the first aspect of the invention). In an embodiment, the instructions further indicate that a change in the level of expression of microRNA(s) relative to the expression of microRNA(s) in a control sample (e.g., a cell or tissue known to be sensitive or resistant to the treatment) indicates a change in sensitivity of the patient to the treatment (e.g., a decrease in the level of expression of a microRNA known to be expressed in cells sensitive to the treatment indicates that the patient is becoming resistant to the treatment or is likely to become resistant to the treatment, and vice versa).

[0015] In another embodiment, the kit can be utilized to determine a patient's resistance or sensitivity to radiation therapy or the chemotherapy agents Vincristine, Cisplatin, Adriamycin, Etoposide, Azaguanine, Aclarubicin, Mitoxantrone, Paclitaxel, Mitomycin, Gemcitabine, Taxotere, Dexamethasone, Methylprednisolone, Ara-C, Methotrexate, Bleomycin, Methyl-GAG, Rituximab, PXD101 (a histone deacetylase (HDAC) inhibitor), 5-Aza-2′-deoxycytidine (Decitabine), Melphalan, IL4-PE38 fusion protein, IL13-PE38QQR fusion protein (cintredekin besudotox), Valproic acid (VPA), All-trans retinoic acid (ATRA), Cytoxan, Topotecan (Hycamtin), Suberoylanilide hydroxamic acid (SAHA, vorinostat, Zolinza), Depsipeptide (FR901229), Bortezomib, Leukeran, Fludarabine, Vinblastine, Busulfan, Dacarbazine, Oxaliplatin, Hydroxyurea, Tegafur, Daunorubicin, Bleomycin, Estramustine, Chlorambucil, Mechlorethamine, Streptozocin, Carmustine, Lomustine, Mercaptopurine, Teniposide, Dactinomycin, Tretinoin, Sunitinib, SPC2996, Ifosfamide, Tamoxifen, Floxuridine, Irinotecan, and Satraplatin by measuring the level of expression of one or more of the microRNAs set forth in the first aspect of the invention and known to change (e.g., to increase or decrease) in a patient sensitive to treatment with these agents (e.g., a patient is determined to be sensitive, or likely to be sensitive, to the indicated treatment if the level of expression of one or more of the microRNA(s) increases or decreases relative to the level of expression of the microRNA(s) in a control sample (e.g., a cell or tissue) in which increased or decreased expression of the or microRNA(s) indicates sensitivity to the treatment, and vice versa).

[0016] In another embodiment, the nucleic acid molecules are characterized by their ability to specifically identify nucleic acid molecules complementary to the microRNAs in a sample collected from a cancer patient.

[0017] In a fifth aspect, the invention features a method of identifying biomarkers (e.g., genes and microRNAs) indicative of sensitivity of a cancer patient to a treatment for cancer by obtaining pluralities of measurements of the expression level of a gene or microRNA (e.g., by detection of the expression of a gene or microRNA using a single probe or by using multiple probes directed to a single gene or microRNA) in different cell types and measurements of the growth of those cell types in the presence of a treatment for cancer relative to the growth of the cell types in the absence of the treatment for cancer; correlating each plurality of measurements of the expression level of the gene or microRNA in cells with the growth of the cells to obtain a correlation coefficient; selecting the median correlation coefficient calculated for the gene or microRNA; and identifying the gene or microRNA as a biomarker for use in determining the sensitivity of a cancer patient to said treatment for cancer if said median correlation coefficient exceeds 0.3 (preferably the gene or microRNA is identified as a biomarker for a patient's sensitivity to a treatment if the correlation coefficient exceeds 0.4, 0.5, 0.6, 0.7, 0.8. 0.9, 0.95, or 0.99 or more). In an embodiment, the method is performed in the presence of a second treatment.

[0018] In a sixth aspect, the invention features a method of determining sensitivity of a patient (e.g., a cancer patient) to a treatment for cancer by obtaining a measurement of the level of expression of a gene or microRNA in a sample (e.g., a cell or tissue) from the patient; applying a model predictive of sensitivity to a treatment for cancer to the measurement, in which the model is developed using an algorithm selected from the group consisting of linear sums, nearest neighbor, nearest centroid, linear discriminant analysis, support vector machines, and neural networks; and determining whether or not the patient will be responsive to the treatment for cancer. In an embodiment, the measurement is obtained by measuring the level of expression of any of the genes or microRNAs set forth in the first aspect of the invention in a cell known to be sensitive or resistant to the treatment. In another embodiment, the method is performed in the presence of a second treatment. In another embodiment, the model combines the outcomes of linear sums, linear discriminant analysis, support vector machines, neural networks, k-nearest neighbors, and nearest centroids, or the model is cross-validated using a random sample of multiple measurements. In another embodiment, treatment, e.g., a compound, has previously failed to show efficacy in a patient. In several embodiments, the linear sum is compared to a sum of a reference population with known sensitivity; the sum of a reference population is the median of the sums derived from the population members' biomarker gene expression. In another embodiment, the model is derived from the components of a data set obtained by independent component analysis or is derived from the components of a data set obtained by principal component analysis. In another embodiment, the invention features a kit, apparatus, and software used to implement the method of the sixth aspect of the invention.

[0019] In several embodiments of all aspects of the invention, the level of expression of the gene(s) is determined by measuring the level of mRNA transcribed from the gene(s), by detecting the level of a protein product of the gene(s), or by detecting the level of the biological activity of a protein product of the gene(s). In further embodiments of all aspects of the invention, an increase or decrease in the expression level of the gene(s) or microRNA(s), relative to the expression level of the gene(s) or microRNA(s) in a cell or tissue sensitive to the treatment, indicates increased sensitivity of the cancer patient to the treatment. Alternatively, an increase or decrease in the expression level of the gene(s) or microRNA(s), relative to the expression level of the gene(s) or microRNA(s) in a cell or tissue resistant to the treatment, indicates increased resistance of the cancer patient to the treatment. In another embodiment of all aspects of the invention, the cell is a cancer cell. In another embodiment of all aspects of the invention, the expression level of the gene(s) is measured using a quantitative reverse transcription-polymerase chain reaction (qRT-PCR). In an embodiment of all aspects of the invention, the level of expression of two of the listed genes or microRNAs is measured, more preferably the level of expression of three, four, five, six, seven, eight, nine, or ten of the listed genes or microRNAs is measured, and most preferably twenty, thirty, forty, fifty, sixty, seventy, eighty, ninety, or one hundred or more of the listed genes or microRNAs is measured. In another embodiment of all aspects of the invention, the expression level of the gene(s) or microRNA(s) is determined using the kit of the third or fourth aspects of the invention.

[0020] In another embodiment of all aspects of the invention, the treatment is radiation therapy or a compound, such as a chemotherapy agent selected from the group consisting of Vincristine, Cisplatin, Adriamycin, Etoposide, Azaguanine, Aclarubicin, Mitoxantrone, Paclitaxel, Mitomycin, Gemcitabine, Taxotere, Dexamethasone, Methylprednisolone, Ara-C, Methotrexate, Bleomycin, Methyl-GAG, Rituximab, PXD101 (a histone deacetylase (HDAC) inhibitor), 5-Aza-2′-deoxycytidine (Decitabine), Melphalan, IL4-PE38 fusion protein, IL13-PE38QQR fusion protein (cintredekin besudotox), Valproic acid (VPA), All-trans retinoic acid (ATRA), Cytoxan, Topotecan (Hycamtin), Suberoylanilide hydroxamic acid (SAHA, vorinostat, Zolinza), Depsipeptide (FR901229), Bortezomib, Leukeran, Fludarabine, Vinblastine, Busulfan, Dacarbazine, Oxaliplatin, Hydroxyurea, Tegafur, Daunorubicin, Bleomycin, Estramustine, Chlorambucil, Mechlorethamine, Streptozocin, Carmustine, Lomustine, Mercaptopurine, Teniposide, Dactinomycin, Tretinoin, Sunitinib, SPC2996, Ifosfamide, Tamoxifen, Floxuridine, Irinotecan, and Satraplatin. In another embodiment of all aspects of the invention, the treatment has previously failed to show effect in a subject (e.g., a subject selected from a subpopulation determined to be sensitive to the treatment, a subject selected from a subpopulation predicted to die without treatment, a subject selected from a subpopulation predicted to have disease symptoms without treatment, a subject selected from a subpopulation predicted to be cured without treatment.

[0021] In another embodiment of all aspects of the invention, the treatment is, e.g., administration of a compound, a protein, an antibody, an oligonucleotide, a chemotherapeutic agent, or radiation to a patient. In an embodiment of all aspects of the invention, the treatment is, e.g., a chemotherapeutic agent, such as, e.g., Vincristine, Cisplatin, Azaguanine, Etoposide, Adriamycin, Aclarubicin, Mitoxantrone, Mitomycin, Paclitaxel, Gemcitabine, Taxotere, Dexamethasone, Ara-C, Methylprednisolone, Methotrexate, Bleomycin, Methyl-GAG, Carboplatin, 5-FU (5-Fluorouracil), a histone deacetylase (HDAC) inhibitor such as PXD101, 5-Aza-2′-deoxycytidine (Decitabine), alpha emitters such as astatine-211, bismuth-212, bismuth-213, lead-212, radium-223, actinium-225, and thorium-227, beta emitters such as tritium, strontium-90, cesium-137, carbon-11, nitrogen-13, oxygen-15, fluorine-18, iron-52, cobalt-55, cobalt-60, copper-61, copper-62, copper-64, zinc-62, zinc-63, arsenic-70, arsenic-71, arsenic-74, bromine-76, bromine-79, rubidium-82, yttrium-86, zirconium-89, indium-110, iodine-120, iodine-124, iodine-129, iodine-131, iodine-125, xenon-122, technetium-94m, technetium-94, technetium-99m, and technetium-99, gamma emitters such as cobalt-60, cesium-137, and technetium-99m, Alemtuzumab, Daclizumab, Rituximab (e.g., MABTHERA™), Trastuzumab (e.g., HERCEPTIN™), Gemtuzumab, Ibritumomab, Edrecolomab, Tositumomab, CeaVac, Epratuzumab, Mitumomab, Bevacizumab, Cetuximab, Edrecolomab, Lintuzumab, MDX-210, IGN-01, MDX-010, MAb, AME, ABX-EGF, EMD 72 000, Apolizumab, Labetuzumab, ior-t1, MDX-220, MRA, H-11 scFv, Oregovomab, huJ591 MAb, BZL, Visilizumab, TriGem, TriAb, R3, MT-201, G-250, unconjugated, ACA-125, Onyvax-105, CDP-860, BrevaRex MAb, AR54, IMC-1C11, GlioMAb-H, ING-1, Anti-LCG MAbs, MT-103, KSB-303, Therex, KW-2871, Anti-HMI.24, Anti-PTHrP, 2C4 antibody, SGN-30, TRAIL-RI MAb, CAT, Prostate cancer antibody, H22xKi-4, ABX-MA1, Imuteran, Monopharm-C, Acivicin, Aclarubicin, Acodazole Hydrochloride, Acronine, Adozelesin, Adriamycin, Aldesleukin, Altretamine, Ambomycin, A. metantrone Acetate, Aminoglutethimide, Amsacrine, Anastrozole, Anthramycin, Asparaginase, Asperlin, Azacitidine, Azetepa, Azotomycin, Batimastat, Benzodepa, Bicalutamide, Bisantrene Hydrochloride, Bisnafide Dimesylate, Bizelesin, Bleomycin Sulfate, Brequinar Sodium, Bropirimine, Busulfan, Cactinomycin, Calusterone, Camptothecin, Caracemide, Carbetimer, Carboplatin, Carmustine, Carubicin Hydrochloride, Carzelesin, Cedefingol, Chlorambucil, Cirolemycin, Cisplatin, Cladribine, Combretestatin A-4, Crisnatol Mesylate, Cyclophosphamide, Cytarabine, Dacarbazine, DACA (N-[2-(Dimethyl-amino)ethyl]acridine-4-carboxamide), Dactinomycin, Daunorubicin Hydrochloride, Daunomycin, Decitabine, Dexormaplatin, Dezaguanine, Dezaguanine Mesylate, Diaziquone, Docetaxel, Dolasatins, Doxorubicin, Doxorubicin Hydrochloride, Droloxifene, Droloxifene Citrate, Dromostanolone Propionate, Duazomycin, Edatrexate, Eflomithine Hydrochloride, Ellipticine, Elsamitrucin, Enloplatin, Enpromate, Epipropidine, Epirubicin Hydrochloride, Erbulozole, Esorubicin Hydrochloride, Estramustine, Estramustine Phosphate Sodium, Etanidazole, Ethiodized Oil I 131, Etoposide, Etoposide Phosphate, Etoprine, Fadrozole Hydrochloride, Fazarabine, Fenretinide, Floxuridine, Fludarabine Phosphate, Fluorouracil, 5-FdUMP, Fluorocitabine, Fosquidone, Fostriecin Sodium, Gemcitabine, Gemcitabine Hydrochloride, Gold Au 198, Homocamptothecin, Hydroxyurea, Idarubicin Hydrochloride, Ifosfamide, Ilmofosine, Interferon Alfa-2a, Interferon Alfa-2b, Interferon Alfa-n1, Interferon Alfa-n3, Interferon Beta-I a, Interferon Gamma-I b, Iproplatin, Irinotecan Hydrochloride, Lanreotide Acetate, Letrozole, Leuprolide Acetate, Liarozole Hydrochloride, Lometrexol Sodium, Lomustine, Losoxantrone Hydrochloride, Masoprocol, Maytansine, Mechlorethamine Hydrochloride, Megestrol Acetate, Melengestrol Acetate, Melphalan, Menogaril, Mercaptopurine, Methotrexate, Methotrexate Sodium, Metoprine, Meturedepa, Mitindomide, Mitocarcin, Mitocromin, Mitogillin, Mitomalcin, Mitomycin, Mitosper, Mitotane, Mitoxantrone Hydrochloride, Mycophenolic Acid, Nocodazole, Nogalamycin, Ormaplatin, Oxisuran, Paclitaxel, Pegaspargase, Peliomycin, Pentamustine, PeploycinSulfate, Perfosfamide, Pipobroman, Piposulfan, Piroxantrone Hydrochloride, Plicamycin, Plomestane, Porfimer Sodium, Porfiromycin, Prednimustine, Procarbazine Hydrochloride, Puromycin, Puromycin Hydrochloride, Pyrazofurin, Rhizoxin, Rhizoxin D, Riboprine, Rogletimide, Safingol, Safingol Hydrochloride, Semustine, Simtrazene, Sparfosate Sodium, Sparsomycin, Spirogermanium Hydrochloride, Spiromustine, Spiroplatin, Streptonigrin, Streptozocin, Strontium Chloride Sr 89, Sulofenur, Talisomycin, Taxane, Taxoid, Tecogalan Sodium, Tegafur, Teloxantrone Hydrochloride, Temoporfin, Teniposide, Teroxirone, Testolactone, Thiamiprine, Thioguanine, Thiotepa, Thymitaq, Tiazofurin, Tirapazamine, Tomudex, TOP53, Topotecan Hydrochloride, Toremifene Citrate, Trestolone Acetate, Triciribine Phosphate, Trimetrexate, Trimetrexate Glucuronate, Triptorelin, Tubulozole Hydrochloride, Uracil Mustard, Uredepa, Vapreotide, Verteporfin, Vinblastine, Vinblastine Sulfate, Vincristine, Vincristine Sulfate, Vindesine, Vindesine Sulfate, Vinepidine Sulfate, Vinglycinate Sulfate, Vinleurosine Sulfate, Vinorelbine Tartrate, Vinrosidine Sulfate, Vinzolidine Sulfate, Vorozole, Zeniplatin, Zinostatin, Zorubicin Hydrochloride, 2-Chlorodeoxyadenosine, 2′ Deoxyformycin, 9-aminocamptothecin, raltitrexed, N-propargyl-5,8-dideazafolic acid, 2chloro-2′-arabino-fluoro-2′-deoxyadenosine, 2-chloro-2′-deoxyadenosine, anisomycin, trichostatin A, hPRL-G129R, CEP-751, linomide, sulfur mustard, nitrogen mustard (mechlor ethamine), cyclophosphamide, melphalan, chlorambucil, ifosfamide, busulfan, N-methyl-Nnitrosourea (MNU), N,N′-Bis(2-chloroethyl)-N-nitrosourea (BCNU), N-(2-chloroethyl)-N′ cyclohexyl-N-nitrosourea (CCNU), N-(2-chloroethyl)-N′-(trans-4-methylcyclohexyl-N-nitrosourea (MeCCNU), N-(2-chloroethyl)-N′-(diethyl)ethylphosphonate-N-nitrosourea (fotemustine), streptozotocin, diacarbazine (DTIC), mitozolomide, temozolomide, thiotepa, mitomycin C, AZQ, adozelesin, Cisplatin, Carboplatin, Ormaplatin, Oxaliplatin, C1-973, DWA 2114R, JM216, JM335, Bis(platinum), tomudex, azacitidine, cytarabine, gemcitabine, 6-Mercaptopurine, 6-Thioguanine, Hypoxanthine, teniposide 9-amino camptothecin, Topotecan, CPT-11, Doxorubicin, Daunomycin, Epirubicin, darubicin, mitoxantrone, losoxantrone, Dactinomycin (Actinomycin D), amsacrine, pyrazoloacridine, all-trans retinol, 14-hydroxy-retro-retinol, all-trans retinoic acid, N-(4-Hydroxyphenyl)retinamide, 13-cis retinoic acid, 3-Methyl TTNEB, 9-cis retinoic acid, fludarabine (2-F-ara-AMP), 2-chlorodeoxyadenosine (2-Cda), 20-pi-1,25 dihydroxyvitamin D3,5-ethynyluracil, abiraterone, aclarubicin, acylfulvene, adecypenol, adozelesin, aldesleukin, ALL-TK antagonists, altretamine, ambamustine, amidox, amifostine, aminolevulinic acid, amrubicin, amsacrine, anagrelide, anastrozole, andrographolide, angiogenesis inhibitors, antagonist D, antagonist G, antarelix, anti-dorsalizing morphogenetic protein-1, antiandrogen, prostatic carcinoma, antiestrogen, antineoplaston, antisense oligonucleotides, aphidicolin glycinate, apoptosis gene modulators, apoptosis regulators, apurinic acid, ara-CDP-DL-PTBA, argininedeaminase, asulacrine, atamestane, atrimustine, axinastatin 1, axinastatin 2, axinastatin 3, azasetron, azatoxin, azatyrosine, baccatin III derivatives, balanol, batimastat, BCR/ABL antagonists, benzochlorins, benzoylstaurosporine, beta lactam derivatives, beta-alethine, betaclamycin B, betulinic acid, bFGF inhibitor, bicalutamide, bisantrene, bisaziridinylspermine, bisnafide, bistratene A, bizelesin, breflate, bleomycin A2, bleomycin B2, bropirimine, budotitane, buthionine sulfoximine, calcipotriol, calphostin C, camptothecin derivatives (e.g., 10-hydroxy-camptothecin), canarypox IL-2, capecitabine, carboxamide-amino-triazole, carboxyamidotriazole, CaRest M3, CARN 700, cartilage derived inhibitor, carzelesin, casein kinase inhibitors (ICOS), castanospermine, cecropin B, cetrorelix, chlorins, chloroquinoxaline sulfonamide, cicaprost, cis-porphyrin, cladribine, clomifene analogues, clotrimazole, collismycin A, collismycin B, combretastatin A4, combretastatin analogue, conagenin, crambescidin 816, crisnatol, cryptophycin 8, cryptophycin A derivatives, curacin A, cyclopentanthraquinones, cycloplatam, cypemycin, cytarabine ocfosfate, cytolytic factor, cytostatin, dacliximab, decitabine, dehydrodidemnin B, 2′deoxycoformycin (DCF), deslorelin, dexifosfamide, dexrazoxane, dexverapamil, diaziquone, didemnin B, didox, diethylnorspermine, dihydro-5-azacytidine, 9-dihydrotaxol, dioxamycin, diphenyl spiromustine, discodermolide, docosanol, dolasetron, doxifluridine, droloxifene, dronabinol, duocarmycin SA, ebselen, ecomustine, edelfosine, edrecolomab, eflomithine, elemene, emitefur, epirubicin, epothilones (A, R═H, B, R═Me), epithilones, epristeride, estramustine analogue, estrogen agonists, estrogen antagonists, etanidazole, etoposide, etoposide 4′-phosphate (etopofos), exemestane, fadrozole, fazarabine, fenretinide, filgrastim, finasteride, flavopiridol, flezelastine, fluasterone, fludarabine, fluorodaunorunicin hydrochloride, forfenimex, formestane, fostriecin, fotemustine, gadolinium texaphyrin, gallium nitrate, galocitabine, ganirelix, gelatinase inhibitors, gemcitabine, glutathione inhibitors, hepsulfam, heregulin, hexamethylene bisacetamide, homoharringtonine (HHT), hypericin, ibandronic acid, idarubicin, idoxifene, idramantone, ilmofosine, ilomastat, imidazoacridones, imiquimod, immunostimulant peptides, insulin-like growth factor-1 receptor inhibitor, interferon agonists, interferons, interleukins, iobenguane, iododoxorubicin, 4-ipomeanol, irinotecan, iroplact, irsogladine, isobengazole, isohomohalicondrin B, itasetron, jasplakinolide, kahalalide F, lamellarin-N triacetate, lanreotide, leinamycin, lenograstim, lentinan sulfate, leptolstatin, letrozole, leukemia inhibiting factor, leukocyte alpha interferon, leuprolide, estrogen, and progesterone combinations, leuprorelin, levamisole, liarozole, linear polyamine analogue, lipophilic disaccharide peptide, lipophilic platinum compounds, lissoclinamide 7, lobaplatin, lombricine, lometrexol, lonidamine, losoxantrone, lovastatin, loxoribine, lurtotecan, lutetium texaphyrin, lysofylline, lytic peptides, maytansine, mannostatin A, marimastat, masoprocol, maspin, matrilysin inhibitors, matrix metalloproteinase inhibitors, menogaril, merbarone, meterelin, methioninase, metoclopramide, MIF inhibitor, ifepristone, miltefosine, mirimostim, mismatched double stranded RNA, mithracin, mitoguazone, mitolactol, mitomycin analogues, mitonafide, mitotoxin fibroblast growth factor-saporin, mitoxantrone, mofarotene, molgramostim, monoclonal antibody, human chorionic gonadotrophin, monophosphoryl lipid A and myobacterium cell wall skeleton combinations, mopidamol, multiple drug resistance gene inhibitor, multiple tumor suppressor 1-based therapy, mustard anticancer agent, mycaperoxide B, mycobacterial cell wall extract, myriaporone, N-acetyldinaline, N-substituted benzamides, nafarelin, nagrestip, naloxone and pentazocine combinations, napavin, naphterpin, nartograstim, nedaplatin, nemorubicin, neridronic acid, neutral endopeptidase, nilutamide, nisamycin, nitric oxide modulators, nitroxide antioxidant, nitrullyn, 06-benzylguanine, octreotide, okicenone, oligonucleotides, onapristone, ondansetron, ondansetron, oracin, oral cytokine inducer, ormaplatin, osaterone, oxaliplatin, oxaunomycin, paclitaxel analogues, paclitaxel derivatives, palauamine, palmitoylrhizoxin, pamidronic acid, panaxytriol, panomifene, parabactin, pazelliptine, pegaspargase, peldesine, pentosan polysulfate sodium, pentostatin, pentrozole, perflubron, perfosfamide, perillyl alcohol, phenazinomycin, phenylacetate, phosphatase inhibitors, picibanil, pilocarpine hydrochloride, pirarubicin, piritrexim, placetin A, placetin B, plasminogen activator inhibitor, platinum complex, platinum compounds, platinum-triamine complex, podophyllotoxin, porfimer sodium, porfiromycin, propyl bis-acridone, prostaglandin J2, proteasome inhibitors, protein A-based immune modulator, protein kinase C inhibitor, protein kinase C inhibitors, microalgal, protein tyrosine phosphatase inhibitors, purine nucleoside phosphorylase inhibitors, purpurins, pyrazoloacridine, pyridoxylated hemoglobin polyoxyethylene conjugate, raf antagonists, raltitrexed, ramosetron, ras farnesyl protein transferase inhibitors, ras inhibitors, ras-GAP inhibitor, retelliptine demethylated, rhenium Re 186 etidronate, rhizoxin, ribozymes, RII retinamide, rogletimide, rohitukine, romurtide, roquinimex, rubiginone B 1, ruboxyl, safingol, saintopin, SarCNU, sarcophytol A, sargramostim, Sdi 1 mimetics, semustine, senescence derived inhibitor 1, sense oligonucleotides, signal transduction inhibitors, signal transduction modulators, single chain antigen binding protein, sizofuran, sobuzoxane, sodium borocaptate, sodium phenylacetate, solverol, somatomedin binding protein, sonermin, sparfosic acid, spicamycin D, spiromustine, splenopentin, spongistatin 1, squalamine, stem cell inhibitor, stem-cell division inhibitors, stipiamide, stromelysin inhibitors, sulfinosine, superactive vasoactive intestinal peptide antagonist, suradista, suramin, swainsonine, synthetic glycosaminoglycans, tallimustine, tamoxifen methiodide, tauromustine, tazarotene, tecogalan sodium, tegafur, tellurapyrylium, telomerase inhibitors, temoporfin, temozolomide, teniposide, tetrachlorodecaoxide, tetrazomine, thaliblastine, thalidomide, thiocoraline, thrombopoietin, thrombopoietin mimetic, thymalfasin, thymopoietin receptor agonist, thymotrinan, thyroid stimulating hormone, tin ethyl etiopurpurin, tirapazamine, titanocene dichloride, topotecan, topsentin, toremifene, totipotent stem cell factor, translation inhibitors, tretinoin, triacetyluridine, triciribine, trimetrexate, triptorelin, tropisetron, turosteride, tyrosine kinase inhibitors, tyrphostins, UBC inhibitors, ubenimex, urogenital sinus-derived growth inhibitory factor, urokinase receptor antagonists, vapreotide, variolin B, vector system, erythrocyte gene therapy, velaresol, veramine, verdins, verteporfin, vinorelbine, vinxaltine, vitaxin, vorozole, zanoterone, zeniplatin, zilascorb, or zinostatin stimalamer. In another embodiment of all aspects of the invention, a second treatment is utilized to determine gene expression in a sample from the patient.

[0022] In another embodiment of all aspects of the invention, the gene is selected from the group consisting of ABL1, ACTB, ACTN1, ACTN4, ACTR2, ADA, ADAM9, ADAMTS1, ADD1, ADORA2A, AF1Q, AIF1, AKAP1, AKAP13, AKR1B1, AKR1C1, AKT1, ALDH2, ALDH3A1, ALDOC, ALG5, ALMS1, ALOX15B, AMIGO2, AMPD2, AMPD3, ANAPC5, ANP32A, ANP32B, ANPEP, ANXA1, ANXA2, AP1G2, APOBEC3B, APRT, ARHE, ARHGAP15, ARHGAP25, ARHGDIB, ARHGEF6, ARL7, ASAH1, ASPH, ATF3, ATIC, ATOX1, ATP1B3, ATP2A2, ATP2A3, ATP5D, ATP5G2, ATP6V1B2, B2M, BASP1, BAX, BC008967, BCAT1, BCHE, BCL11B, BDNF, BHLHB2, BIN2, BLM, BLMH, BLVRA, BMI1, BNIP3, BRDT, BRRN1, BTN3A2, BTN3A3, C11orf2, C14orf139, C15orf25, C18orf10, C1orf24, C1orf29, C1orf38, C1QR1, C22orf18, C5orf13, C6orf32, CACNA1G, CACNB3, CALD1, CALM1, CALML4, CALU, CAP350, CAPG, CAPN2, CAPN3, CASP2, CASP6, CASP7, CAST, CBFB, CBLB, CBR1, CBX3, CCL2, CCL21, CCNA2, CCNB1IP1, CCND3, CCR7, CCR9, CCT5, CD151, CD1A, CD1B, CD1C, CD1D, CD1E, CD2, CD28, CD37, CD3D, CD3E, CD3G, CD3Z, CD44, CD47, CD53, CD59, CD6, CD63, CD81, CD8A, CD8B1, CD99, CDC10, CDCl₄B, CDH11, CDH2, CDKL5, CDKN2A, CDW52, CECR1, CENPB, CENTB1, CENTG2, CEP1, CG018, CHRNA3, CHS1, CIAPIN1, CKAP4, CKIP-1, CNN3, CNP, COL1A1, COL4A1, COL4A2, COL5A2, COL6A1, COL6A2, COPA, COPEB, CORO1A, CORO1C, COX7B, CPSF1, CRABP1, CREB3L1, CRIP2, CRK, CRY1, CSDA, CSPG2, CSRP1, CST3, CTBP1, CTGF, CTNNA1, CTSB, CTSC, CTSD, CTSL, CUGBP2, CUTC, CXCL1, CXCR4, CXorf9, CYFIP2, CYLD, CYR61, DATF1, DAZAP1, DBN1, DBT, DCTN1, DDOST, DDX18, DDX5, DGKA, DIAPH1, DIPA, DKC1, DKFZP434J154, DKFZP564C186, DKFZP564G2022, DKFZp564J157, DKFZP564K0822, DNAJC10, DNAPTP6, DOCK10, DOCK2, DPAGT1, DPEP2, DPYSL3, DSIPI, DUSP1, DUSP3, DXS9879E, DYRK2, E2F4, ECE1, ECM1, EEF1A1, EEF1B2, EEF1G, EFNB2, EHD2, EIF2S2, EIF3S2, EIF4B, EIF4G3, EIF5A, ELA2B, ELK3, EMP3, ENO2, EPAS1, EPB41L4B, ERCC2, ERG, ERP70, EVER1, EVI2A, EVL, EXT1, EZH2, F2R, FABP5, FAD104, FAM46A, FARSLA, FAT, FAU, FBL, FCGR2A, FCGR2C, FER1L3, FGFR1, FHL1, FHOD1, FKBP1A, FKBP9, FLII, FLJ10350, FLJ10539, FLJ10774, FLJ12270, FLJ13373, FLJ20859, FLJ21159, FLJ22457, FLJ35036, FLJ46603, FLNC, FLOT1, FMNL1, FN1, FNBP1, FOLH1, FOXF2, FSCN1, FSTL1, FTH1, FTL, FYB, FYN, GOS2, G6PD, GALIG, GALNT6, GAPD, GAS7, GATA2, GATA3, GFPT1, GIMAP5, GIT2, GJA1, GLRB, GLTSCR2, GLUL, GMDS, GMFG, GNA15, GNAI2, GNAQ, GNB2, GNB5, GOT2, GPNMB, GPR65, GPRASP1, GPSM3, GRP58, GSTM2, GTF3A, GTSE1, GYPC, GZMA, GZMB, H1F0, H1FX, H2AFX, H3F3A, HA-1, HCLS1, HEM1, HEXB, HIC, HIST1H4C, HK1, HLA-A, HLA-B, HLA-DRA, HMGA1, HMGB2, HMGN2, HMMR, HNRPA1, HNRPD, HNRPM, HOXA9, HPRT1, HRMT1L1, HSA9761, HSPA5, HSU79274, HTATSF1, HU6800, ICAM1, ICAM2, IER3, IFI16, IFI44, IFITM2, IFITM3, IFRG28, IGFBP2, IGFBP3, IGSF4, IL13RA2, IL21R, IL2RG, IL4R, IL6, IL6R, IL6ST, IL8, IMPDH2, INPP5D, INSIG1, IQGAP1, IQGAP2, IRS2, ITGA3, ITGA5, ITGB2, ITK, ITM2A, JAK1, JARID2, JUNB, K-ALPHA-1, KHDRBS1, KIAA0220, KLAA0355, KIAA0802, KIAA0877, KIAA0922, KIAA1078, KIAA1128, KIAA1393, KIFC1, KPNB1, LAIR1, LAMB1, LAMB3, LAMR1, LAPTM5, LAT, LBR, LCK, LCP1, LCP2, LDHB, LEF1, LEPRE1, LGALS1, LGALS9, LHFPL2, LMNB1, LNK, LOC54103, LOC55831, LOC81558, LOC94105, LONP, LOX, LOXL2, LPHN2, LPXN, LRMP, LRP12, LRRC5, LRRN3, LST1, LTB, LUM, LY9, LY96, M6PRBP1, MAD2L1BP, MAGEB2, MAL, MAN1A1, MAP1B, MAP1LC3B, MAP4K1, MAPK1, MAPRE1, MARCKS, MAZ, MCAM, MCL1, MCM5, MCM7, MDH2, MDK, MDN1, MEF2C, MFNG, MGC17330, MGC21654, MGC2744, MGC4083, MGC8721, MGC8902, MGLL, MIA, MICA, MLPH, MME, MMP2, MPHOSPH6, MPP1, MPZL1, MRP63, MRPL12, MRPS2, MSN, MT1E, MT1K, MUF1, MVP, MYB, MYC, MYL6, MYL9, MYO1B, NAP1L1, NAP1L2, NARF, NARS, NASP, NBL1, NCL, NCOR2, NDN, NDUFAB1, NDUFS6, NFIL3, NFKBIA, NID2, NIPA2, NK4, NME4, NME7, NNMT, NOL5A, NOL8, NOMO2, NOTCH1, NPC1, NQO1, NR1D2, NUCB2, NUDC, NUP210, NUP88, NVL, NXF1, OBFC1, OCRL, OGT, OK/SW-c1.56, OPTN, OXA1L, P2RX5, P4HA1, PACAP, PAF53, PAFAH1B3, PALM2-AKAP2, PAX6, PBEF1, PCBP2, PCCB, PEA15, PFDN5, PFN1, PFN2, PGAM1, PGK1, PHEMX, PHLDA1, PIM2, PITPNC1, PKM2, PLAC8, PLAGL1, PLAU, PLAUR, PLCB1, PLEK2, PLEKHC1, PLOD2, PLSCR1, PNAS-4, PNMA2, POLR2F, PON2, PPAP2B, PPIA, PPIF, PPP1R11, PPP2CB, PRF1, PRG1, PRIM1, PRKCA, PRKCB1, PRKCH, PRKCQ, PRKD2, PRNP, PRP19, PRPF8, PRPS1, PRSS11, PRSS23, PSCDBP, PSMB9, PSMC3, PSMC5, PSME2, PTGER4, PTGES2, PTMA, PTOV1, PTP4A3, PTPN7, PTPNS1, PTPRC, PTPRCAP, PTRF, PTS, PURA, PWP1, PYGL, QKI, RAB31, RAB3GAP, RAB7, RAB7L1, RAB9P40, RAC2, RAFTLIN, RAG2, RALY, RAP1B, RASGRP2, RBMX, RBPMS, RCN1, REA, RFC3, RFC5, RGC32, RGS3, RHOC, RHOH, RIMS3, RIOK3, RIPK2, RIS1, RNASE6, RNF144, RNPS1, RPL10, RPL10A, RPL11, RPL12, RPL13, RPL13A, RPL17, RPL18, RPL18A, RPL24, RPL3, RPL32, RPL36A, RPL39, RPL7, RPL9, RPLP0, RPLP2, RPS10, RPS11, RPS15, RPS15A, RPS19, RPS2, RPS23, RPS24, RPS25, RPS27, RPS28, RPS4X, RPS4Y1, RPS6, RPS7, RPS9, RRAS, RRAS2, RRBP1, RRM2, RUNX1, RUNX3, S100A13, S100A4, SART3, SATB1, SCAP1, SCARB1, SCARB2, SCN3A, SCTR, SEC31L2, SEC61G, SELL, SELPLG, SEMA4G, SEPT6, SEPT10, SEPW1, SERPINA1, SERPINB1, SERPINB6, SFRS3, SFRS5, SFRS6, SFRS7, SH2D1A, SH3GL3, SH3TC1, SHD1, SHFM1, SHMT2, SIAT1, SKB1, SKP2, SLA, SLC1A4, SLC20A1, SLC25A15, SLC25A5, SLC39A14, SLC39A6, SLC43A3, SLC4A2, SLC7A11, SLC7A6, SMA3, SMAD3, SMARCD3, SMOX, SMS, SND1, SNRPA, SNRPB, SNRPB2, SNRPE, SNRPF, SOD2, SOX4, SP140, SPANXC, SPARC, SPI1, SRF, SRM, SRRM1, SSA2, SSBP2, SSRP1, SSSCA1, STAG3, STAT1, STAT4, STAT5A, STC1, STC2, STMN1, STOML2, SUI1, T3JAM, TACC1, TACC3, TAF5, TAGLN, TAL1, TAP1, TARP, TBCA, TCF12, TCF4, TCF7, TFDP2, TFPI, TFRC, TGFB1, TIMM17A, TIMP1, TJP1, TK2, TM4SF1, TM4SF2, TM4SF8, TM6SF1, TMEM2, TMEM22, TMSB10, TMSNB, TNFAIP3, TNFAIP8, TNFRSF10B, TNFRSF1A, TNFRSF7, TNIK, TNPO1, TOB1, TOMM20, TOP2A, TOX, TPK1, TPM2, TRA@, TRA1, TRAM2, TRB@, TRD@, TRIM, TRIM14, TRIM22, TRIM28, TRIP13, TRPV2, TUBA3, TUBGCP3, TUFM, TUSC3, TXN, TXNDC5, UBASH3A, UBB, UBC, UBE2A, UBE2L6, UBE2S, UCHL1, UCK2, UCP2, UFD1L, UGCG, UGDH, UGT2B17, ULK2, UMPS, UNG, UROD, USP34, USP4, USP7, VASP, VAV1, VIM, VLDLR, VWF, WARS, WASPIP, WBSCR20A, WBSCR20C, WHSC1, WNT5A, XPO1, ZAP128, ZAP70, ZFP36L1, ZNF32, ZNF335, ZNF593, ZNFN1A1, or ZYX.

[0023] The nucleic acid sequence of each listed genes is publicly available through the GenBank or RefSeq database (http://www.ncbi.nlm.nih.gov/sites/gquery). The gene sequences are also included as part of the HG-U133A GeneChip from Affymetrix, Inc.

[0024] “Resistant” or “resistance” as used herein means that a cell, a tumor, a patient (e.g., a human), or a living organism is able to withstand treatment, e.g., with a compound, such as a chemotherapeutic agent, or radiation treatment, in that the treatment inhibits the growth of a cell, e.g., a cancer cell, in vitro or in a tumor, patient, or living organism by less than 10%, 20%, 30%, 40%, 50%, 60%, or 70% relative to the growth of a similar cell not exposed to the treatment. Resistance to treatment can be determined by a cell-based assay that measures the growth of treated cells as a function of the cells' absorbance of an incident light beam as used to perform the NCI60 assays described herein. In this example, greater absorbance indicates greater cell growth, and thus, resistance to the treatment. A reduction in growth indicates more resistance to a treatment. By “chemoresistant” or “chemoresistance” is meant resistance to a compound.

[0025] “Sensitive” or “sensitivity” as used herein means that a cell, a tumor, a patient (e.g., a human), or a living organism is responsive to treatment, e.g., with a compound, such as a chemotherapeutic agent, or radiation treatment, in that the treatment inhibits the growth of a cell, e.g., a cancer cell, in vitro or in a tumor, patient, or living organism by 70%, 80%, 90%, 95%, 99%, or 100%. Sensitivity to treatment may be determined by a cell-based assay that measures the growth of treated cells as a function of the cells' absorbance of an incident light beam as used to perform the NCI60 assays described herein. In this example, lesser absorbance indicates reduced cell growth, and thus, sensitivity to the treatment. A greater reduction in growth indicates more sensitivity to the treatment. By “chemosensitive” or “chemosensitivity” is meant sensitivity to a compound.

[0026] “Complement” of a nucleic acid sequence or a “complementary” nucleic acid sequence as used herein refers to an oligonucleotide which is in “antiparallel association” when it is aligned with the nucleic acid sequence such that the 5′ end of one sequence is paired with the 3′ end of the other. Nucleotides and other bases can have complements and may be present in complementary nucleic acids. Bases not commonly found in natural nucleic acids that can be included in the nucleic acids of the present invention include, for example, inosine and 7-deazaguanine. “Complementarity” may not be perfect; stable duplexes of complementary nucleic acids can contain mismatched base pairs or unmatched bases. Skilled artisans can determine duplex stability empirically considering a number of variables including, for example, the length of the oligonucleotide, percent concentration of cytosine and guanine bases in the oligonucleotide, ionic strength, and incidence of mismatched base pairs. Typically, complementarity is determined by comparing contiguous nucleic acid sequences.

[0027] When complementary nucleic acid sequences form a stable duplex, they are said to be “hybridized” or to “hybridize” to each other or it is said that “hybridization” has occurred. Nucleic acids are referred to as being “complementary” if they contain nucleotides or nucleotide homologues that can form hydrogen bonds according to Watson-Crick base-pairing rules (e.g., G with C, A with T, or A with U) or other hydrogen bonding motifs such as, for example, diaminopurine with T, 5-methyl C with G, 2-thiothymidine with A, inosine with C, and pseudoisocytosine with G. Anti-sense RNA can be complementary to other oligonucleotides, e.g., mRNA.

[0028] “Biomarker” as used herein indicates a transcription product (e.g., RNA, such as an RNA primary transcript, mRNA, tRNA, rRNA, microRNA (miRNA), or complementary RNA or DNA (e.g., cDNA) strands thereof) or a translation product (e.g., a polypeptide or metabolite thereof) of a biomarker gene, as defined herein, whose level of expression indicates the sensitivity or resistance of a cell (e.g., a cancer cell), tissue, organism, or patient (e.g., a human) to a treatment (e.g., chemotherapy, radiation therapy, or surgery).

[0029] “Compound” as used herein means a chemical or biological substance, e.g., a drug, a protein, an antibody, or an oligonucleotide, which can be used to treat a disease or which has biological activity in vivo or in vitro. Compounds may or may not be approved by the U.S. Food and Drug Administration (FDA). Preferred compounds include, e.g., chemotherapy agents that can inhibit cancer growth. Preferred chemotherapy agents include, e.g., Vincristine, Cisplatin, Azaguanine, Etoposide, Adriamycin, Aclarubicin, Mitoxantrone, Mitomycin, Paclitaxel, Gemcitabine, Taxotere, Dexamethasone, Ara-C, Methylprednisolone, Methotrexate, Bleomycin, Methyl-GAG, Carboplatin, 5-FU (5-Fluorouracil), Rituximab (e.g., MABTHERA™), histone deacetylase (HDAC) inhibitors, and 5-Aza-2′-deoxycytidine (Decitabine). Exemplary radioactive chemotherapeutic agents include compounds containing alpha emitters such as astatine-211, bismuth-212, bismuth-213, lead-212, radium-223, actinium-225, and thorium-227, beta emitters such as tritium, strontium-90, cesium-137, carbon-11, nitrogen-13, oxygen-15, fluorine-18, iron-52, cobalt-55, cobalt-60, copper-61, copper-62, copper-64, zinc-62, zinc-63, arsenic-70, arsenic-71, arsenic-74, bromine-76, bromine-79, rubidium-82, yttrium-86, zirconium-89, indium-110, iodine-120, iodine-124, iodine-129, iodine-131, iodine-125, xenon-122, technetium-94m, technetium-94, technetium-99m, and technetium-99, and gamma emitters such as cobalt-60, cesium-137, and technetium-99m. Exemplary chemotherapeutic agents also include antibodies such as Alemtuzumab, Daclizumab, Rituximab (e.g., MABTHERA™), Trastuzumab (e.g., HERCEPTIN™), Gemtuzumab, Ibritumomab, Edrecolomab, Tositumomab, CeaVac, Epratuzumab, Mitumomab, Bevacizumab, Cetuximab, Edrecolomab, Lintuzumab, MDX-210, IGN-101, MDX-010, MAb, AME, ABX-EGF, EMD 72 000, Apolizumab, Labetuzumab, ior-t1, MDX-220, MRA, H-11 scFv, Oregovomab, huJ591 MAb, BZL, Visilizumab, TriGem, TriAb, R3, MT-201, G-250, ACA-125, Onyvax-105, CDP-860, BrevaRex MAb, AR54, IMC-1C11, GlioMAb-H, ING-1, Anti-LCG MAbs, MT-103, KSB-303, Therex, KW-2871, Anti-HMI.24, Anti-PTHrP, 2C4 antibody, SGN-30, TRAIL-R1 MAb, CAT, Prostate cancer antibody, H22xKi-4, ABX-MA1, Imuteran, and Monopharm-C. Exemplary chemotherapeutic agents also include Acivicin; Aclarubicin; Acodazole Hydrochloride; Acronine; Adozelesin; Adriamycin; Aldesleukin; Altretamine; Ambomycin; A. metantrone Acetate; Aminoglutethimide; Amsacrine; Anastrozole; Anthramycin; Asparaginase; Asperlin; Azacitidine; Azetepa; Azotomycin; Batimastat; Benzodepa; Bicalutamide; Bisantrene Hydrochloride; Bisnafide Dimesylate; Bizelesin; Bleomycin Sulfate; Brequinar Sodium; Bropirimine; Busulfan; Cactinomycin; Calusterone; Camptothecin; Caracemide; Carbetimer; Carboplatin; Carmustine; Carubicin Hydrochloride; Carzelesin; Cedefingol; Chlorambucil; Cirolemycin; Cisplatin; Cladribine; Combretestatin A-4; Crisnatol Mesylate; Cyclophosphamide; Cytarabine; Dacarbazine; DACA (N-[2-(Dimethyl-amino) ethyl]acridine-4-carboxamide); Dactinomycin; Daunorubicin Hydrochloride; Daunomycin; Decitabine; Dexormaplatin; Dezaguanine; Dezaguanine Mesylate; Diaziquone; Docetaxel; Dolasatins; Doxorubicin; Doxorubicin Hydrochloride; Droloxifene; Droloxifene Citrate; Dromostanolone Propionate; Duazomycin; Edatrexate; Eflomithine Hydrochloride; Ellipticine; Elsamitrucin; Enloplatin; Enpromate; Epipropidine; Epirubicin Hydrochloride; Erbulozole; Esorubicin Hydrochloride; Estramustine; Estramustine Phosphate Sodium; Etanidazole; Ethiodized Oil I 131; Etoposide; Etoposide Phosphate; Etoprine; Fadrozole Hydrochloride; Fazarabine; Fenretinide; Floxuridine; Fludarabine Phosphate; Fluorouracil; 5-FdUMP; Fluorocitabine; Fosquidone; Fostriecin Sodium; Gemcitabine; Gemcitabine Hydrochloride; Gold Au 198; Homocamptothecin; Hydroxyurea; Idarubicin Hydrochloride; Ifosfamide; Ilmofosine; Interferon Alfa-2a; Interferon Alfa-2b; Interferon Alfa-n1; Interferon Alfa-n3; Interferon Beta-I a; Interferon Gamma-I b; Iproplatin; Irinotecan Hydrochloride; Lanreotide Acetate; Letrozole; Leuprolide Acetate; Liarozole Hydrochloride; Lometrexol Sodium; Lomustine; Losoxantrone Hydrochloride; Masoprocol; Maytansine; Mechlorethamine Hydrochloride; Megestrol Acetate; Melengestrol Acetate; Melphalan; Menogaril; Mercaptopurine; Methotrexate; Methotrexate Sodium; Metoprine; Meturedepa; Mitindomide; Mitocarcin; Mitocromin; Mitogillin; Mitomalcin; Mitomycin; Mitosper; Mitotane; Mitoxantrone Hydrochloride; Mycophenolic Acid; Nocodazole; Nogalamycin; Ormaplatin; Oxisuran; Paclitaxel; Pegaspargase; Peliomycin; Pentamustine; PeploycinSulfate; Perfosfamide; Pipobroman; Piposulfan; Piroxantrone Hydrochloride; Plicamycin; Plomestane; Porfimer Sodium; Porfiromycin; Prednimustine; Procarbazine Hydrochloride; Puromycin; Puromycin Hydrochloride; Pyrazofurin; Rhizoxin; Rhizoxin D; Riboprine; Rogletimide; Safingol; Safingol Hydrochloride; Semustine; Simtrazene; Sparfosate Sodium; Sparsomycin; Spirogermanium Hydrochloride; Spiromustine; Spiroplatin; Streptonigrin; Streptozocin; Strontium Chloride Sr 89; Sulofenur; Talisomycin; Taxane; Taxoid; Tecogalan Sodium; Tegafur; Teloxantrone Hydrochloride; Temoporfin; Teniposide; Teroxirone; Testolactone; Thiamiprine; Thioguanine; Thiotepa; Thymitaq; Tiazofurin; Tirapazamine; Tomudex; TOP53; Topotecan Hydrochloride; Toremifene Citrate; Trestolone Acetate; Triciribine Phosphate; Trimetrexate; Trimetrexate Glucuronate; Triptorelin; Tubulozole Hydrochloride; Uracil Mustard; Uredepa; Vapreotide; Verteporfin; Vinblastine; Vinblastine Sulfate; Vincristine; Vincristine Sulfate; Vindesine; Vindesine Sulfate; Vinepidine Sulfate; Vinglycinate Sulfate; Vinleurosine Sulfate; Vinorelbine Tartrate; Vinrosidine Sulfate; Vinzolidine Sulfate; Vorozole; Zeniplatin; Zinostatin; Zorubicin Hydrochloride; 2-Chlorodeoxyadenosine; 2′ Deoxyformycin; 9-aminocamptothecin; raltitrexed; N-propargyl-5,8-dideazafolic acid; 2chloro-2′-arabino-fluoro-2′-deoxyadenosine; 2-chloro-2′-deoxyadenosine; anisomycin; trichostatin A; hPRL-G129R; CEP-751; linomide; sulfur mustard; nitrogen mustard (mechlor ethamine); cyclophosphamide; melphalan; chlorambucil; ifosfamide; busulfan; N-methyl-Nnitrosourea (MNU); N,N′-Bis(2-chloroethyl)-N-nitrosourea (BCNU); N-(2-chloroethyl)-N′ cyclohexyl-N-nitrosourea (CCNU); N-(2-chloroethyl)-N′-(trans-4-methylcyclohexyl-N-nitrosourea (MeCCNU); N-(2-chloroethyl)-N′-(diethyl)ethylphosphonate-N-nitrosourea (fotemustine); streptozotocin; diacarbazine (DTIC); mitozolomide; temozolomide; thiotepa; mitomycin C; AZQ; adozelesin; Cisplatin; Carboplatin; Ormaplatin; Oxaliplatin; C1-973; DWA 2114R; JM216; JM335; Bis(platinum); tomudex; azacitidine; cytarabine; gemcitabine; 6-Mercaptopurine; 6-Thioguanine; Hypoxanthine; teniposide 9-amino camptothecin; Topotecan; CPT-11; Doxorubicin; Daunomycin; Epirubicin; darubicin; mitoxantrone; losoxantrone; Dactinomycin (Actinomycin D); amsacrine; pyrazoloacridine; all-trans retinol; 14-hydroxy-retro-retinol; all-trans retinoic acid; N-(4-Hydroxyphenyl)retinamide; 13-cis retinoic acid; 3-Methyl TTNEB; 9-cis retinoic acid; fludarabine (2-F-ara-AMP); and 2-chlorodeoxyadenosine (2-Cda).

[0030] Other chemotherapeutic agents include, but are not limited to, 20-pi-1,25 dihydroxyvitamin D3; 5-ethynyluracil; abiraterone; aclarubicin; acylfulvene; adecypenol; adozelesin; aldesleukin; ALL-TK antagonists; altretamine; ambamustine; amidox; amifostine; aminolevulinic acid; amrubicin; amsacrine; anagrelide; anastrozole; andrographolide; angiogenesis inhibitors; antagonist D; antagonist G; antarelix; anti-dorsalizing morphogenetic protein-1; antiandrogen; antiestrogen; antineoplaston; antisense oligonucleotides; aphidicolin glycinate; apoptosis gene modulators; apoptosis regulators; apurinic acid; ara-CDP-DL-PTBA; argininedeaminase; asulacrine; atamestane; atrimustine; axinastatin 1; axinastatin 2; axinastatin 3; azasetron; azatoxin; azatyrosine; baccatin III derivatives; balanol; batimastat; BCR/ABL antagonists; benzochlorins; benzoylstaurosporine; beta lactam derivatives; beta-alethine; betaclamycin B; betulinic acid; bFGF inhibitor; bicalutamide; bisantrene; bisaziridinylspermine; bisnafide; bistratene A; bizelesin; breflate; bleomycin A2; bleomycin B2; bropirimine; budotitane; buthionine sulfoximine; calcipotriol; calphostin C; camptothecin derivatives (e.g., 10-hydroxy-camptothecin); canarypox IL-2; capecitabine; carboxamide-amino-triazole; carboxyamidotriazole; CaRest M3; CARN 700; cartilage derived inhibitor; carzelesin; casein kinase inhibitors (ICOS); castanospermine; cecropin B; cetrorelix; chlorins; chloroquinoxaline sulfonamide; cicaprost; cis-porphyrin; cladribine; clomifene analogues; clotrimazole; collismycin A; collismycin B; combretastatin A4; combretastatin analogue; conagenin; crambescidin 816; crisnatol; cryptophycin 8; cryptophycin A derivatives; curacin A; cyclopentanthraquinones; cycloplatam; cypemycin; cytarabine ocfosfate; cytolytic factor; cytostatin; dacliximab; decitabine; dehydrodidemnin B; 2′deoxycoformycin (DCF); deslorelin; dexifosfamide; dexrazoxane; dexverapamil; diaziquone; didemnin B; didox; diethylnorspermine; dihydro-5-azacytidine; 9-dihydrotaxol; dioxamycin; diphenyl spiromustine; discodermolide; docosanol; dolasetron; doxifluridine; droloxifene; dronabinol; duocarmycin SA; ebselen; ecomustine; edelfosine; edrecolomab; eflomithine; elemene; emitefur; epirubicin; epothilones (A, R═H; B, R=Me); epithilones; epristeride; estramustine analogue; estrogen agonists; estrogen antagonists; etanidazole; etoposide; etoposide 4′-phosphate (etopofos); exemestane; fadrozole; fazarabine; fenretinide; filgrastim; finasteride; flavopiridol; flezelastine; fluasterone; fludarabine; fluorodaunorunicin hydrochloride; forfenimex; formestane; fostriecin; fotemustine; gadolinium texaphyrin; gallium nitrate; galocitabine; ganirelix; gelatinase inhibitors; gemcitabine; glutathione inhibitors; hepsulfam; heregulin; hexamethylene bisacetamide; homoharringtonine (HHT); hypericin; ibandronic acid; idarubicin; idoxifene; idramantone; ilmofosine; ilomastat; imidazoacridones; imiquimod; immunostimulant peptides; insulin-like growth factor-1 receptor inhibitor; interferon agonists; interferons; interleukins; iobenguane; iododoxorubicin; 4-ipomeanol; irinotecan; iroplact; irsogladine; isobengazole; isohomohalicondrin B; itasetron; jasplakinolide; kahalalide F; lamellarin-N triacetate; lanreotide; leinamycin; lenograstim; lentinan sulfate; leptolstatin; letrozole; leukemia inhibiting factor; leukocyte alpha interferon; leuprolide, estrogen, and progesterone combinations; leuprorelin; levamisole; liarozole; linear polyamine analogue; lipophilic disaccharide peptide; lipophilic platinum compounds; lissoclinamide 7; lobaplatin; lombricine; lometrexol; lonidamine; losoxantrone; lovastatin; loxoribine; lurtotecan; lutetium texaphyrin; lysofylline; lytic peptides; maytansine; mannostatin A; marimastat; masoprocol; maspin; matrilysin inhibitors; matrix metalloproteinase inhibitors; menogaril; merbarone; meterelin; methioninase; metoclopramide; MIF inhibitor; ifepristone; miltefosine; mirimostim; mismatched double stranded RNA; mithracin; mitoguazone; mitolactol; mitomycin analogues; mitonafide; mitotoxin fibroblast growth factor-saporin; mitoxantrone; mofarotene; molgramostim; monoclonal antibody, human chorionic gonadotrophin; monophosphoryl lipid A and myobacterium cell wall skeleton combinations; mopidamol; multiple drug resistance gene inhibitor; multiple tumor suppressor 1-based therapy; mustard anticancer agent; mycaperoxide B; mycobacterial cell wall extract; myriaporone; N-acetyldinaline; N-substituted benzamides; nafarelin; nagrestip; naloxone and pentazocine combinations; napavin; naphterpin; nartograstim; nedaplatin; nemorubicin; neridronic acid; neutral endopeptidase; nilutamide; nisamycin; nitric oxide modulators; nitroxide antioxidant; nitrullyn; 06-benzylguanine; octreotide; okicenone; oligonucleotides; onapristone; ondansetron; ondansetron; oracin; oral cytokine inducer; ormaplatin; osaterone; oxaliplatin; oxaunomycin; paclitaxel analogues; paclitaxel derivatives; palauamine; palmitoylrhizoxin; pamidronic acid; panaxytriol; panomifene; parabactin; pazelliptine; pegaspargase; peldesine; pentosan polysulfate sodium; pentostatin; pentrozole; perflubron; perfosfamide; perillyl alcohol; phenazinomycin; phenylacetate; phosphatase inhibitors; picibanil; pilocarpine hydrochloride; pirarubicin; piritrexim; placetin A; placetin B; plasminogen activator inhibitor; platinum complex; platinum compounds; platinum-triamine complex; podophyllotoxin; porfimer sodium; porfiromycin; propyl bis-acridone; prostaglandin J2; proteasome inhibitors; protein A-based immune modulator; protein kinase C inhibitor; protein kinase C inhibitors, microalgal; protein tyrosine phosphatase inhibitors; purine nucleoside phosphorylase inhibitors; purpurins; pyrazoloacridine; pyridoxylated hemoglobin polyoxyethylene conjugate; raf antagonists; raltitrexed; ramosetron; ras farnesyl protein transferase inhibitors; ras inhibitors; ras-GAP inhibitor; retelliptine demethylated; rhenium Re 186 etidronate; rhizoxin; ribozymes; RII retinamide; rogletimide; rohitukine; romurtide; roquinimex; rubiginone B1; ruboxyl; safingol; saintopin; SarCNU; sarcophytol A; sargramostim; Sd±1 mimetics; semustine; senescence derived inhibitor 1; sense oligonucleotides; signal transduction inhibitors; signal transduction modulators; single chain antigen binding protein; sizofuran; sobuzoxane; sodium borocaptate; sodium phenylacetate; solverol; somatomedin binding protein; sonermin; sparfosic acid; spicamycin D; spiromustine; splenopentin; spongistatin 1; squalamine; stem cell inhibitor; stem-cell division inhibitors; stipiamide; stromelysin inhibitors; sulfinosine; superactive vasoactive intestinal peptide antagonist; suradista; suramin; swainsonine; synthetic glycosaminoglycans; tallimustine; tamoxifen methiodide; tauromustine; tazarotene; tecogalan sodium; tegafur; tellurapyrylium; telomerase inhibitors; temoporfin; temozolomide; teniposide; tetrachlorodecaoxide; tetrazomine; thaliblastine; thalidomide; thiocoraline; thrombopoietin; thrombopoietin mimetic; thymalfasin; thymopoietin receptor agonist; thymotrinan; thyroid stimulating hormone; tin ethyl etiopurpurin; tirapazamine; titanocene dichloride; topotecan; topsentin; toremifene; totipotent stem cell factor; translation inhibitors; tretinoin; triacetyluridine; triciribine; trimetrexate; triptorelin; tropisetron; turosteride; tyrosine kinase inhibitors; tyrphostins; UBC inhibitors; ubenimex; urogenital sinus-derived growth inhibitory factor; urokinase receptor antagonists; vapreotide; variolin B; vector system, erythrocyte gene therapy; velaresol; veramine; verdins; verteporfin; vinorelbine; vinxaltine; vitaxin; vorozole; zanoterone; zeniplatin; zilascorb; and zinostatin stimalamer.

[0031] To “inhibit growth” as used herein means causing a reduction in cell growth in vivo or in vitro by, e.g., 10%, 20%, 30%, 40%, 50%, 60%, 70%, 80%, 90%, 95%, or 99% or more, as evident by a reduction in the size or number of cells exposed to a treatment (e.g., exposure to a compound), relative to the size or number of cells in the absence of the treatment. Growth inhibition can be the result of a treatment that induces apoptosis in a cell, induces necrosis in a cell, slows cell cycle progression, disrupts cellular metabolism, induces cell lysis, or induces some other mechanism that reduces the size or number of cells.

[0032] “Biomarker gene” as used herein means a gene in a cell (e.g., a cancer cell) the expression of which, as measured by, e.g., detecting the level of one or more biomarkers produced from the gene, correlates to sensitivity or resistance of the cell, tissue, organism, or patient (e.g., a human) to a treatment (e.g., chemotherapy, radiation therapy, or surgery).

[0033] “Microarray” as used herein means a device employed by any method that quantifies one or more subject oligonucleotides, e.g., DNA or RNA, or analogues thereof, at a time. One exemplary class of microarrays consists of DNA probes attached to a glass or quartz surface. Many microarrays, e.g., those made by Affymetrix, use several probes for determining the expression of a single gene. The DNA microarray can contain oligonucleotide probes that may be, e.g., full-length cDNAs complementary to an RNA or cDNA fragments that hybridize to part of an RNA. Exemplary RNAs include mRNA, miRNA, and miRNA precursors. Exemplary microarrays also include a “nucleic acid microarray” having a substrate-bound plurality of nucleic acids, hybridization to each of the plurality of bound nucleic acids being separately detectable. The substrate can be solid or porous, planar or non-planar, unitary or distributed. Exemplary nucleic acid microarrays include all of the devices so called in Schena (ed.), DNA Microarrays: A Practical Approach (Practical Approach Series), Oxford University Press (1999); Nature Genet. 21(1)(suppl.):1-60 (1999); and Schena (ed.), Microarray Biochip: Tools and Technology, Eaton Publishing Company/BioTechniques Books Division (2000). Additionally, exemplary nucleic acid microarrays can include a substrate-bound plurality of nucleic acids in which the plurality of nucleic acids is disposed on a plurality of beads, rather than on a unitary planar substrate, as is described, inter alia, in Brenner et al., Proc. Natl. Acad. Sci. USA 97(4):1665-1670 (2000). Examples of nucleic acid microarrays may be found in U.S. Pat. Nos. 6,391,623, 6,383,754, 6,383,749, 6,380,377, 6,379,897, 6,376,191, 6,372,431, 6,351,712 6,344,316, 6,316,193, 6,312,906, 6,309,828, 6,309,824, 6,306,643, 6,300,063, 6,287,850, 6,284,497, 6,284,465, 6,280,954, 6,262,216, 6,251,601, 6,245,518, 6,263,287, 6,251,601, 6,238,866, 6,228,575, 6,214,587, 6,203,989, 6,171,797, 6,103,474, 6,083,726, 6,054,274, 6,040,138, 6,083,726, 6,004,755, 6,001,309, 5,958,342, 5,952,180, 5,936,731, 5,843,655, 5,814,454, 5,837,196, 5,436,327, 5,412,087, and 5,405,783, herein incorporated by reference.

[0034] Exemplary microarrays can also include “peptide microarrays” or “protein microarrays” having a substrate-bound plurality of polypeptides, the binding of a oligonucleotide, a peptide, or a protein to the plurality of bound polypeptides being separately detectable. Alternatively, the peptide microarray, can have a plurality of binders, including, but not limited to, monoclonal antibodies, polyclonal antibodies, phage display binders, yeast 2 hybrid binders, aptamers, that can specifically detect the binding of specific oligonucleotides, peptides, or proteins. Examples of peptide arrays may be found in International Patent Publication Nos. WO 02/31463, WO 02/25288, WO 01/94946, WO 01/88162, WO 01/68671, WO 01/57259, WO 00/61806, WO 00/54046, WO 00/47774, WO 99/40434, WO 99/39210, and WO 97/42507, and in U.S. Pat. Nos. 6,268,210, 5,766,960, and 5,143,854, herein incorporated by reference.

[0035] “Gene expression” as used herein means the level of expression of a biomarker gene (e.g., the level of a transcription product, such as an mRNA, tRNA, or microRNA, or its complement (e.g., a cDNA complement of the transcription product), or a translation product, such as a polypeptide or metabolite thereof) in a cell, tissue, organism, or patient (e.g., a human). Gene expression can be measured by detecting the presence, quantity, or activity of a DNA, RNA, or polypeptide, or modifications thereof (e.g., splicing, phosphorylation, and acetylation) associated with a given gene.

[0036] “NCI60” as used herein means a panel of 60 cancer cell lines from lung, colon, breast, ovarian, leukemia, renal, melanoma, prostate, and brain cancers including the following cancer cell lines: NSCLC_NCIH23, NSCLC_NCIH522, NSCLC_A549ATCC, NSCLC_EKVX, NSCLC_NCIH226, NSCLC_NCIH332M, NSCLC_H460, NSCLC_HOP62, NSCLC_HOP92, COLON_HT29, COLON_HCC-2998, COLON_HCT116, COLON_SW620, COLON_COLO205, COLON_HCT15, COLON_KM12, BREAST_MCF7, BREAST_MCF7ADRr, BREAST_MDAMB231, BREAST_HS578T, BREAST_MDAMB435, BREAST_MDN, BREAST_BT549, BREAST_T47D, OVAR_OVCAR3, OVAR_OVCAR4, OVAR_OVCAR5, OVAR_OVCAR8, OVAR_IGROV1, OVAR_SKOV3, LEUK_CCRFCEM, LEUK_K562, LEUK_MOLT4, LEUK_HL60, LEUK_RPMI8266, LEUK_SR, RENAL_UO31, RENAL_SN12C, RENAL_A498, RENAL_CAKI1, RENAL_RXF393, RENAL_{—}7860, RENAL_ACHN, RENAL_TK10, MELAN_LOXIMVI, MELAN_MALME3M, MELAN_SKMEL2, MELAN_SKMEL5, MELAN_SKMEL28, MELAN_M14, MELAN_UACC62, MELAN_UACC257, PROSTATE_PC3, PROSTATE_DU145, CNS_SNB19, CNS_SNB75, CNS_U251, CNS_SF268, CNS_SF295, and CNS_SF539.

[0037] “Treatment” or “medical treatment” means administering to a patient (e.g., a human) or living organism or exposing to a cell or tumor a compound (e.g., a drug, a protein, an antibody, an oligonucleotide, a chemotherapeutic agent, and a radioactive agent) or some other form of medical intervention used to treat or prevent cancer or the symptoms of cancer (e.g., cryotherapy and radiation therapy). Radiation therapy includes the administration to a patient of radiation generated from sources such as particle accelerators and related medical devices that emit X-radiation, gamma radiation, or electron (Beta radiation) beams. A treatment may further include surgery, e.g., to remove a tumor from a patient or living organism.

[0038] Other features and advantages of the invention will be apparent from the following description, drawings, and claims.

### BRIEF DESCRIPTION OF THE DRAWINGS

[0039] FIG. 1 depicts an illustration of the method of identifying biomarkers and predicting patient sensitivity to a medical treatment. The method has an in vitro component where the growth inhibition of a compound or medical treatment is measured on cell lines (6 of the 60 cell lines tested are shown). The gene expression is measured on the same cell lines without compound treatment. Those genes that have a correlation above a certain cutoff (e.g., a preferred cutoff of 0.3, in which a correlation coefficient equal to or greater than the cutoff of 0.3 is deemed statistically significant by, e.g., cross-validation) to the growth inhibition are termed marker genes and the expression of those genes in vivo, e.g., may predict the sensitivity or resistance of a patient's cancer to a compound or other medical treatment. The in vivo component is applied to a patient to determine whether or not the treatment will be effective in treating disease in the patient. Here, the gene expression in cells of a sample of the suspected disease tissue (e.g., a tumor) in the patient is measured before or after treatment. The activity of the marker genes in the sample is compared to a reference population of patients known to be sensitive or resistant to the treatment. The expression of marker genes in the cells of the patient known to be expressed in the cells of reference patients sensitive to the treatment indicates that the patient to be treated is sensitive to the treatment and vice versa. Based on this comparison the patient is predicted to be sensitive or resistant to treatment with the compound.

[0040] FIG. 2 depicts the treatment sensitivity predictions for a 5-year-old American boy with a brain tumor. The subject had surgery to remove the tumor and, based on the analysis of gene expression in cells from a sample of the tumor, the subject was predicted to be chemosensitive to ten chemotherapy drugs. The subject received Vincristine and Cisplatin and survived.

[0041] FIG. 3 depicts the treatment sensitivity predictions for a 7-month-old American girl with a brain tumor. The subject had surgery to remove the tumor, and based on the analysis of gene expression in cells from a sample of the tumor, the subject was predicted to be chemoresistant to twelve chemotheraphydrugs. The subject received Vincristine and Cisplatin, but passed away 9 months later.

[0042] FIG. 4 depicts the survival rate of 60 brain cancer patients divided into a group predicted to be chemosensitive to Cisplatin and a group predicted to be chemoresistant to Cisplatin. All patients received Cisplatin after surgery.

[0043] FIG. 5 depicts the survival rate of 56 lymphoma patients divided into a group predicted to be chemosensitive to Vincristine and Adriamycin and a group predicted to be chemoresistant. All patients received Vincristine and Adriamycin.

[0044] FIG. 6 depicts the survival rate of 19 lung cancer patients divided into a group predicted to be chemosensitive to Cisplatin and a group predicted to be chemoresistant. All patients received Cisplatin.

[0045] FIG. 7 depicts the survival rate of 14 diffuse large-B-cell lymphoma (DLBCL) patients divided into a group predicted to be chemosensitive to the drug combination R-CHOP and a group predicted to be chemoresistant. All patients were treated with R-CHOP.

[0046] FIG. 8 depicts the predictions of sensitivity or resistance to treatment of a patient diagnosed with DLBCL. Various drug combinations and radiation therapy are considered. The drug combinations (indicated by abbreviations) are those commonly used to treat DLBCL.

[0047] FIG. 9 depicts the survival rate of 60 brain cancer patients divided into a group predicted to be sensitive to radiation treatment and a group predicted to be resistant. All patients were treated with radiation.

[0048] FIG. 10 depicts the survival rate of 60 brain cancer patients divided into a group predicted to be sensitive to radiation treatment and a group predicted to be resistant. All patients were treated with radiation. Gene biomarkers used in predicting radiation sensitivity or resistance were obtained using the correlation of the median gene expression measurement to cancer cell growth as opposed to the median of the correlations as employed in FIG. 9.

[0049] FIG. 11 depicts the predicted sensitivity of cancer patients to sunitinib. The cancer patients are grouped according to cancer type or origin and cancer types with predicted high sensitivity are labeled.

### DETAILED DESCRIPTION

[0050] The invention features methods for identifying biomarkers of treatment sensitivity, e.g., chemosensitivity to compounds, or resistance, devices that include the biomarkers, kits that include the devices, and methods for predicting treatment efficacy in a patient (e.g., a human diagnosed with cancer). The kits of the invention include microarrays having oligonucleotide probes that are biomarkers of sensitivity or resistance to treatment (e.g., treatment with a chemotherapeutic agent) that hybridize to nucleic acids derived from or obtained from a subject and instructions for using the device to predict the sensitivity or resistance of the subject to the treatment. The invention also features methods of using the microarrays to determine whether a subject, e.g., a cancer patient, will be sensitive or resistant to treatment with, e.g., a chemotherapy agent. Also featured are methods of identifying biomarkers of sensitivity or resistance to a medical treatment based on the correlation of gene or microRNA expression to treatment efficacy, e.g., the growth inhibition of cancer cells. Gene or microRNA biomarkers that identify subjects as sensitive or resistant to a treatment can also be identified within patient populations already thought to be sensitive or resistant to that treatment. Thus, the methods, devices, and kits of the invention can be used to identify patient subpopulations that are responsive to a treatment thought to be ineffective for treating disease (e.g., cancer) in the general population. More generally, cancer patient sensitivity to a compound or other medical treatment can be predicted using biomarker expression regardless of prior knowledge about patient responsiveness to treatment. The method according to the present invention can be implemented using software that is run on an apparatus (e.g., a computer) for measuring biomarker expression in connection with a microarray. The microarray (e.g., a DNA microarray), included in a kit for processing a tumor sample from a patient, and the apparatus for reading the microarray and turning the result into a chemosensitivity profile for the patient may be used to implement the methods of the invention.

### Microarrays Containing Oligonucleotide Probes

[0051] The microarrays of the invention include one or more oligonucleotide probes that have nucleotide sequences that are substantially identical to or substantially complementary to, e.g., at least 5, 8, 12, 20, 30, 40, 60, 80, 100, 150, or 200 consecutive nucleotides (or nucleotide analogues) of the biomarker genes or biomarker gene products (e.g., transcription or translation gene products, such as microRNAs) listed below. The oligonucleotide probes may be, e.g., 5-20, 25, 5-50, 50-100, or over 100 nucleotides long. The oligonucleotide probes may be deoxyribonucleic acids (DNA) or ribonucleic acids (RNA). Consecutive nucleotides within the oligonucleotide probes (e.g., 5-20, 25, 5-50, 50-100, or over 100 consecutive nucleotides), which are used as biomarkers of chemosensitivity, may also appear as consecutive nucleotides in one or more of the genes described herein beginning at or near, e.g., the first, tenth, twentieth, thirtieth, fortieth, fiftieth, sixtieth, seventieth, eightieth, ninetieth, hundredth, hundred-fiftieth, two-hundredth, five-hundredth, or one-thousandth nucleotide of the genes or microRNAs listed in Tables 1-136 below. Column List_{—}2006 of Tables 1-21 indicates the preferred biomarker genes for the compound lists. Column List_Preferred of Tables 1-21 indicates the most preferred biomarker genes. Column List_{—}2005 of Tables 1-21 indicates additional biomarkers employed in Examples 1-8. Column Correlation of Tables 1-21 indicates the correlation coefficient of the biomarker gene expression to cancer cell growth inhibition. Tables 80-136 indicate microRNA biomarkers that can be used to determine a patient's (e.g., a human's) sensitivity to a treatment. The following combinations of biomarkers have been used to detect a patient's sensitivity to the indicated treatment:

a) One or more of the gene sequences SFRS3, CCT5, RPL39, SLC25A5, UBE2S, EEF1A1, RPLP2, RPL24, RPS23, RPL39, RPL18, NCL, RPL9, RPL10A, RPS10, E1F3S2, SHFM1, RPS28, REA, RPL36A, GAPD, HNRPA1, RPS11, HNRPA1, LDHB, RPL3, RPL11, MRPL12, RPL18A, COX7B, and RPS7, preferably gene sequences UBB, RPS4X, S100A4, NDUFS6, B2M, C14orf139, MANIA 1, SLC25A5, RPL10, RPL12, E1F5A, RPL36A, SUI1, BLMH, CTBP1, TBCA, MDH2, and DXS9879E, and most preferably gene sequences RPS4X, S100A4, NDUFS6, C14orf139, SLC25A5, RPL10, RPL12, EIF5A, RPL36A, BLMH, CTBP1, TBCA, MDH2, and DXS9879E, whose expression indicates chemosensitivity to Vincristine.
b) One or more of the gene sequences B2M, ARHGDIB, FTL, NCL, MSN, SNRPF, XPO1, LDHB, SNRPF, GAPD, PTPN7, ARHGDIB, RPS27, IFI16, C5orf13, and HCLS1, preferably gene sequences C1QR1, HCLS1, CD53, SLA, PTPN7, PTPRCAP, ZNFN1A1, CENTB1, PTPRC, IFI16, ARHGEF6, SEC31L2, CD3Z, GZMB, CD3D, MAP4K1, GPR65, PRF1, ARHGAP15, TM6SF1, and TCF4, and most preferably gene sequences C1QR1, SLA, PTPN7, ZNFN1A1, CENTB1, IFI16, ARHGEF6, SEC31L2, CD3Z, GZMB, CD3D, MAP4K1, GPR65, PRF1, ARHGAP15, TM6SF1, and TCF4, whose expression indicates chemosensitivity to Cisplatin.
c) One or more of the gene sequences PRPS1, DDOST, B2M, SPARC, LGALS1, CBFB, SNRPB2, MCAM, MCAM, E1F2S2, HPRT1, SRM, FKBP1A, GYPC, UROD, MSN, HNRPA1, SND1, COPA, MAPRE1, E1F3S2, ATP1B3, EMP3, ECM1, ATOX1, NARS, PGK1, OK/SW-c1.56, FN1, EEF1A1, GNAI2, PRPS1, RPL7, PSMB9, GPNMB, PPP1R11, MIA, RAB7, VIM, and SMS, preferably gene sequences MSN, SPARC, VIM, SRM, SCARB1, SIAT1, CUGBP2, GAS7, ICAM1, WASPIP, ITM2A, PALM2-AKAP2, ANPEP, PTPNS1, MPP1, LNK, FCGR2A, EMP3, RUNX3, EVI2A, BTN3A3, LCP2, BCHE, LY96, LCP1, IFI16, MCAM, MEF2C, SLC1A4, BTN3A2, FYN, FN1, C1orf38, CHS1, CAPN3, FCGR2C, TNIK, AMPD2, SEPT6, RAFTLIN, SLC43A3, RAC2, LPXN, CKIP-1, FLJ10539, FLJ35036, DOCK10, TRPV2, IFRG28, LEF1, and ADAMTS1, and most preferably gene sequences SRM, SCARB1, SIAT1, CUGBP2, ICAM1, WASPIP, ITM2A, PALM2-AKAP2, PTPNS1, MPP1, LNK, FCGR2A, RUNX3, EVI2A, BTN3A3, LCP2, BCHE, LY96, LCP1, IFI16, MCAM, MEF2C, SLC1A4, FYN, C1orf38, CHS1, FCGR2C, TNIK, AMPD2, SEPT6, RAFTLIN, SLC43A3, RAC2, LPXN, CKIP-1, FLJ10539, FLJ35036, DOCK10, TRPV2, IFRG28, LEF1, and ADAMTS1, whose expression indicates chemosensitivity to Azaguanine.
d) One or more of the gene sequences B2M, MYC, CD99, RPS24, PPIF, PBEF1, and ANP32B, preferably gene sequences CD99, INSIG1, LAPTM5, PRG1, MUF1, HCLS1, CD53, SLA, SSBP2, GNB5, MFNG, GMFG, PSMB9, EVI2A, PTPN7, PTGER4, CXorf9, PTPRCAP, ZNFN1A1, CENTB1, PTPRC, NAP1L1, HLA-DRA, IFI16, CORO1A, ARHGEF6, PSCDBP, SELPLG, LAT, SEC31L2, CD3Z, SH2D1A, GZMB, SCN3A, ITK, RAFTLIN, DOCK2, CD3D, RAC2, ZAP70, GPR65, PRF1, ARHGAP15, NOTCH1, and UBASH3A, and most preferably gene sequences CD99, INSIG1, PRG1, MUF1, SLA, SSBP2, GNB5, MFNG, PSMB9, EVI2A, PTPN7, PTGER4, CXorf9, ZNFN1A1, CENTB1, NAP1L1, HLA-DRA, IFI16, ARHGEF6, PSCDBP, SELPLG, LAT, SEC31L2, CD3Z, SH2D1A, GZMB, SCN3A, RAFTLIN, DOCK2, CD3D, RAC2, ZAP70, GPR65, PRF1, ARHGAP15, NOTCH1, and UBASH3A, whose expression indicates chemosensitivity to Etoposide.
e) One or more of the gene sequences KIAA0220, B2M, TOP2A, CD99, SNRPE, RPS27, HNRPA1, CBX3, ANP32B, HNRPA1, DDX5, PPIA, SNRPF, and USP7, preferably gene sequences CD99, LAPTM5, ALDOC, HCLS1, CD53, SLA, SSBP2, IL2RG, GMFG, CXorf9, RHOH, PTPRCAP, ZNFN1A1, CENTB1, TCF7, CD1C, MAP4K1, CD1B, CD3G, PTPRC, CCR9, CORO1A, CXCR4, ARHGEF6, HEM1, SELPLG, LAT, SEC31L2, CD3Z, SH2D1A, CD1A, LAIR1, ITK, TRB@, CD3D, WBSCR20C, ZAP70, IFI44, GPR65, AIF1, ARHGAP15, NARF, and PACAP, and most preferably gene sequences CD99, ALDOC, SLA, SSBP2, IL2RG, CXorf9, RHOH, ZNFN1A1, CENTB1, CD1C, MAP4K1, CD3G, CCR9, CXCR4, ARHGEF6, SELPLG, LAT, SEC31L2, CD3Z, SH2D1A, CD 1A, LAIR1, TRB@, CD3D, WBSCR20C, ZAP70, IFI44, GPR65, AIF1, ARHGAP15, NARF, and PACAP, whose expression indicates chemosensitivity to Adriamycin.
f) One or more of the gene sequences RPLP2, LAMR1, RPS25, EIF5A, TUFM, HNRPA1, RPS9, MYB, LAMR1, ANP32B, HNRPA1, HNRPA1, EIF4B, HMGB2, RPS15A, and RPS7, preferably gene sequences RPL12, RPL32, RPLP2, MYB, ZNFN1A1, SCAP1, STAT4, SP140, AMPD3, TNFAIP8, DDX18, TAF5, FBL, RPS2, PTPRC, DOCK2, GPR65, HOXA9, FLJ12270, and HNRPD, and most preferably gene sequences RPL12, RPLP2, MYB, ZNFN1A1, SCAP1, STAT4, SP140, AMPD3, TNFAIP8, DDX18, TAF5, RPS2, DOCK2, GPR65, HOXA9, FLJ12270, and HNRPD, whose expression indicates chemosensitivity to Aclarubicin.
g) One or more of the gene sequences ARHGEF6, B2M, TOP2A, TOP2A, ELA2B, PTMA, LMNB1, TNFRSF1A, NAP1L1, B2M, HNRPA1, RPL9, C5orf13, NCOR2, ANP32B, OK/SW-c1.56, TUBA3, HMGN2, PRPS1, DDX5, PRG1, PPIA, G6PD, PSMB9, SNRPF, and MAP1B, preferably gene sequences PGAM1, DPYSL3, INSIG1, GJA1, BNIP3, PRG1, G6PD, BASP1, PLOD2, LOXL2, SSBP2, C1orf29, TOX, STC1, TNFRSF1A, NCOR2, NAP1L1, LOC94105, COL6A2, ARHGEF6, GATA3, TFPI, LAT, CD3Z, AF1Q, MAP1B, PTPRC, PRKCA, TRIM22, CD3D, BCAT1, IFI44, CCL2, RAB31, CUTC, NAP1L2, NME7, FLJ21159, and COL5A2, and most preferably gene sequences PGAM1, DPYSL3, INSIG1, GJA1, BNIP3, PRG1, G6PD, PLOD2, LOXL2, SSBP2, C1orf29, TOX, STC1, TNFRSF1A, NCOR2, NAP1L1, LOC94105, ARHGEF6, GATA3, TFPI, LAT, CD3Z, AF1Q, MAP1B, TRIM22, CD3D, BCAT1, IFI44, CUTC, NAP1L2, NME7, FLJ21159, and COL5A2, whose expression indicates chemosensitivity to Mitoxantrone.
h) One or more of the gene sequences GAPD, GAPD, GAPD, TOP2A, SUI1, TOP2A, FTL, HNRPC, TNFRSF1A, SHC1, CCT7, P4HB, CTSL, DDX5, G6PD, and SNRPF, preferably gene sequences STC1, GPR65, DOCK10, COL5A2, FAM46A, and LOC54103, and most preferably gene sequences STC1, GPR65, DOCK10, COL5A2, FAM46A, and LOC54103, whose expression indicates chemosensitivity to Mitomycin.
i) One or more of the gene sequences RPS23, SFRS3, KIAA0114, RPL39, SFRS3, LOC51035, RPS6, EXOSC2, RPL35, IFRD2, SMN2, EEF1A1, RPS3, RPS18, and RPS7, preferably gene sequences RPL10, RPS4X, NUDC, RALY, DKC1, DKFZP564C186, PRP19, RAB9P40, HSA9761, GMDS, CEP1, IL13RA2, MAGEB2, HMGN2, ALMS1, GPR65, FLJ10774, NOL8, DAZAP1, SLC25A15, PAF53, DXS9879E, PITPNC1, SPANXC, and KIAA1393, and most preferably RPL10, RPS4X, NUDC, DKC1, DKFZP564C186, PRP19, RAB9P40, HSA9761, GMDS, CEP1, IL13RA2, MAGEB2, HMGN2, ALMS1, GPR65, FLJ10774, NOL8, DAZAP1, SLC25A15, PAF53, DXS9879E, PITPNC1, SPANXC, and KIAA1393, whose expression indicates chemosensitivity to Paclitaxel.
j) One or more of the gene sequences CSDA, LAMR1, and TUBA3, preferably gene sequences PFN1, PGAM1, K-ALPHA-1, CSDA, UCHL1, PWP1, PALM2-AKAP2, TNFRSF1A, ATP5G2, AF1Q, NME4, and FHOD1, and most preferably gene sequences PFN1, PGAM1, K-ALPHA-1, CSDA, UCHL1, PWP1, PALM2-AKAP2, TNFRSF1A, ATP5G2, AF1Q, NME4, and FHOD1, whose expression indicates chemosensitivity to Gemcitabine.
k) One or more of the gene sequences RPS23, SFRS3, KIAA0114, SFRS3, RPS6, DDX39, and RPS7, preferably gene sequences ANP32B, GTF3A, RRM2, TRIM14, SKP2, TRIP13, RFC3, CASP7, TXN, MCM5, PTGES2, OBFC1, EPB41L4B, and CALML4, and most preferably gene sequences ANP32B, GTF3A, RRM2, TRIM14, SKP2, TRIP13, RFC3, CASP7, TXN, MCM5, PTGES2, OBFC1, EPB41L4B, and CALML4, whose expression indicates chemosensitivity to Taxotere.
l) One or more of the gene sequences IL2RG, H1FX, RDBP, ZAP70, CXCR4, TM4SF2, ARHGDIB, CDA, CD3E, STMN1, GNA15, AXL, CCND3, SATB1, EIF5A, LCK, NKX2-5, LAPTM5, IQGAP2, FLII, EIF3S5, TRB, CD3D, HOXB2, GATA3, HMGB2, PSMB9, ATP5G2, CORO1A, ARHGDIB, DRAP1, PTPRCAP, RHOH, and ATP2A3, preferably gene sequences IFITM2, UBE2L6, LAPTM5, USP4, ITM2A, ITGB2, ANPEP, CD53, IL2RG, CD37, GPRASP1, PTPN7, CXorf9, RHOH, GIT2, ADORA2A, ZNFN1A1, GNA15, CEP1, TNFRSF7, MAP4K1, CCR7, CD3G, PTPRC, ATP2A3, UCP2, CORO1A, GATA3, CDKN2A, HEM1, TARP, LAIR1, SH2D1A, FLII, SEPT6, HA-1, CREB3L1, ERCC2, CD3D, LST1, AIF1, ADA, DATF1, ARHGAP15, PLAC8, CECR1, LOC81558, and EHD2, and most preferably gene sequences IFITM2, UBE2L6, USP4, ITM2A, IL2RG, GPRASP1, PTPN7, CXorf9, RHOH, GIT2, ZNFN1A1, CEP1, TNFRSF7, MAP4K1, CCR7, CD3G, ATP2A3, UCP2, GATA3, CDKN2A, TARP, LAIR1, SH2D1A, SEPT6, HA-1, ERCC2, CD3D, LST1, AIF1, ADA, DATF1, ARHGAP15, PLAC8, CECR1, LOC81558, and EHD2, whose expression indicates chemosensitivity to Dexamethasone.
m) One or more of the gene sequences TM4SF2, ARHGDIB, ADA, H2AFZ, NAP1L1, CCND3, FABP5, LAMR1, REA, MCM5, SNRPF, and USP7, preferably gene sequences ITM2A, RHOH, PRIM1, CENTB1, GNA15, NAP1L1, ATP5G2, GATA3, PRKCQ, SH2D1A, SEPT6, PTPRC, NME4, RPL13, CD3D, CD1E, ADA, and FHOD1, and most preferably gene sequences ITM2A, RHOH, PRIM1, CENTB1, NAP1L1, ATP5G2, GATA3, PRKCQ, SH2D1A, SEPT6, NME4, CD3D, CD1E, ADA, and FHOD1, whose expression indicates chemosensitivity to Ara-C.
n) One or more of the gene sequences LGALS9, CD7, IL2RG, PTPN7, ARHGEF6, CENTB1, SEPT6, SLA, LCP1, IFITM1, ZAP70, CXCR4, TM4SF2, ZNF91, ARHGDIB, TFDP2, ADA, CD99, CD3E, CD1C, STMN1, CD53, CD7, GNA15, CCND3, MAZ, SATB1, ZNF22, AES, AIF1, MYB, LCK, C5orf13, NKX2-5, ZNFN1A1, STAT5A, CHI3L2, LAPTM5, MAP4K1, DDX11, GPSM3, TRB, CD3D, CD3G, PRKCB1, CD1E, HCLS1, GATA3, TCF7, RHOG, CDW52, HMGB2, DGKA, ITGB2, PSMB9, IDH2, AES, MCM5, NUCB2, CORO1A, ARHGDIB, PTPRCAP, CD47, RHOH, LGALS9, and ATP2A3, preferably gene sequences CD99, SRRM1, ARHGDIB, LAPTM5, VWF, ITM2A, ITGB2, LGALS9, INPP5D, SATB1, CD53, TFDP2, SLA, IL2RG, MFNG, CD37, GMFG, SELL, CDW52, LRMP, ICAM2, RIMS3, PTPN7, ARHGAP25, LCK, CXorf9, RHOH, PTPRCAP, GIT2, ZNFN1A1, CENTB1, LCP2, SPI1, GNA15, GZMA, CEP1, BLM, CD8A, SCAP1, CD2, CD1C, TNFRSF7, VAV1, MAP4K1, CCR7, C6orf32, ALOX15B, BRDT, CD3G, PTPRC, LTB, ATP2A3, NVL, RASGRP2, LCP1, CORO1A, CXCR4, PRKD2, GATA3, TRA@, PRKCB1, HEM1, KIAA0922, TARP, SEC31L2, PRKCQ, SH2D1A, CHRNA3, CD1A, LST1, LAIR1, CACNA1G, TRB@, SEPT6, HA-1, DOCK2, CD3D, TRD@, T3JAM, FNBP1, CD6, AIF1, FOLH1, CD1E, LY9, UGT2B17, ADA, CDKL5, TRIM, EVL, DATF1, RGC32, PRKCH, ARHGAP15, NOTCH1, BIN2, SEMA4G, DPEP2, CECR1, BCL11B, STAG3, GALNT6, UBASH3A, PHEMX, FLJ13373, LEF1, IL21R, MGC17330, AKAP13, ZNF335, and GIMAP5, and most preferably gene sequences CD99, ARHGDIB, VWF, ITM2A, LGALS9, INPP5D, SATB1, TFDP2, SLA, IL2RG, MENG, SELL, CDW52, LRMP, ICAM2, RIMS3, PTPN7, ARHGAP25, LCK, CXorf9, RHOH, GIT2, ZNFN1A1, CENTB1, LCP2, SPI1, GZMA, CEP1, CD8A, SCAP1, CD2, CD1C, TNFRSF7, VAV1, MAP4K1, CCR7, C6orf32, ALOX15B, BRDT, CD3G, LTB, ATP2A3, NVL, RASGRP2, LCP1, CXCR4, PRKD2, GATA3, TRA@, KIAA0922, TARP, SEC31L2, PRKCQ, SH2D1A, CHRNA3, CD1A, LST1, LAIR1, CACNA1G, TRB@, SEPT6, HA-1, DOCK2, CD3D, TRD@, T3JAM, FNBP1, CD6, AIF1, FOLH1, CD1E, LY9, ADA, CDKL5, TRIM, EVL, DATF1, RGC32, PRKCH, ARHGAP15, NOTCH1, BIN2, SEMA4G, DPEP2, CECR1, BCL11B, STAG3, GALNT6, UBASH3A, PHEMX, FLJ13373, LEF1, IL21R, MGC17330, AKAP13, ZNF335, and GIMAP5, whose expression indicates chemosensitivity to Methylprednisolone.
o) One or more of the gene sequences RPLP2, RPL4, HMGA1, RPL27, IMPDH2, LAMR1, PTMA, ATP5B, NPM1, NCL, RPS25, RPL9, TRAP1, RPL21, LAMR1, REA, HNRPA1, LDHB, RPS2, NME1, PAICS, EEF1B2, RPS15A, RPL19, RPL6, ATP5G2, SNRPF, SNRPG, and RPS7, preferably gene sequences PRPF8, RPL18, RNPS1, RPL32, EEF1G, GOT2, RPL13A, PTMA, RPS15, RPLP2, CSDA, KHDRBS1, SNRPA, IMPDH2, RPS19, NUP88, ATP5D, PCBP2, ZNF593, HSU79274, PRIM1, PFDN5, OXA1L, H3F3A, ATIC, RPL13, CIAPIN1, FBL, RPS2, PCCB, RBMX, SHMT2, RPLP0, HNRPA1, STOML2, RPS9, SKB1, GLTSCR2, CCNB1IP1, MRPS2, FLJ20859, and FLJ12270, and most preferably gene sequences PRPF8, RPL18, GOT2, RPL13A, RPS15, RPLP2, CSDA, KHDRBS1, SNRPA, IMPDH2, RPS19, NUP88, ATP5D, PCBP2, ZNF593, HSU79274, PRIM1, PFDN5, OXA1L, H3F3A, ATIC, CIAPIN1, RPS2, PCCB, SHMT2, RPLP0, HNRPA1, STOML2, SKB1, GLTSCR2, CCNB1IP1, MRPS2, FLJ20859, and FLJ12270, whose expression indicates chemosensitivity to Methotrexate.
p) One or more of the gene sequences ACTB, COL5A1, MT1E, CSDA, COL4A2, MMP2, COL1A1, TNFRSF1A, CFHL1, TGFBI, FSCN1, NNMT, PLAUR, CSPG2, NFIL3, C5orf13, NCOR2, TUBB4, MYLK, TUBA3, PLAU, COL4A2, COL6A2, COL6A3, IFITM2, PSMB9, CSDA, and COL1A1, preferably gene sequences MSN, PFN1, HK1, ACTR2, MCL1, ZYX, RAP 1B, GNB2, EPAS1, PGAM1, CKAP4, DUSP1, MYL9, K-ALPHA-1, LGALS1, CSDA, AKR1B1, IFITM2, ITGA5, VIM, DPYSL3, JUNB, ITGA3, NFKBIA, LAMB1, FHL1, INSIG1, TIMP1, GJA1, PSME2, PRG1, EXT1, DKFZP434J154, OPTN, M6PRBP1, MVP, VASP, ARL7, NNMT, TAP1, COL1A1, BASP1, PLOD2, ATF3, PALM2-AKAP2, IL8, ANPEP, LOXL2, TGFB1, IL4R, DGKA, STC2, SEC61G, NFIL3, RGS3, NK4, F2R, TPM2, PSMB9, LOX, STC1, CSPG2, PTGER4, IL6, SMAD3, PLAU, WNT5A, BDNF, TNFRSF1A, FLNC, DKFZP564K0822, FLOT1, PTRF, HLA-B, COL6A2, MGC4083, TNFRSF10B, PLAGL1, PNMA2, TFPI, LAT, GZMB, CYR61, PLAUR, FSCN1, ERP70, AF1Q, UBC, FGFR1, HIC, BAX, COL4A2, COL6A1, IFITM3, MAP1B, FLJ46603, RAFTLIN, RRAS, FTL, KIAA0877, MT1E, CDC10, DOCK2, TRIM22, RIS1, BCAT1, PRF1, DBN1, MT1K, TMSB10, RAB31, FLJ10350, C1orf24, NME7, TMEM22, TPK1, COL5A2, ELK3, CYLD, ADAMTS1, EHD2, and ACTB, and most preferably gene sequences PFN1, HK1, MCL1, ZYX, RAP1B, GNB2, EPAS1, PGAM1, CKAP4, DUSP1, MYL9, K-ALPHA-1, LGALS1, CSDA, IFITM2, ITGA5, DPYSL3, JUNB, NFKBIA, LAMB1, FHL1, INSIG1, TIMP1, GJA1, PSME2, PRG1, EXT1, DKFZP434J154, MVP, VASP, ARL7, NNMT, TAP1, PLOD2, ATF3, PALM2-AKAP2, IL8, LOXL2, IL4R, DGKA, STC2, SEC61G, RGS3, F2R, TPM2, PSMB9, LOX, STC1, PTGER4, IL6, SMAD3, WNT5A, BDNF, TNFRSF1A, FLNC, DKFZP564K0822, FLOT1, PTRF, HLA-B, MGC4083, TNFRSF10B, PLAGL1, PNMA2, TFPI, LAT, GZMB, CYR61, PLAUR, FSCN1, ERP70, AF1Q, HIC, COL6A1, IFITM3, MAP1B, FLJ46603, RAFTLIN, RRAS, FTL, KIAA0877, MT1E, CDC10, DOCK2, TRIM22, RIS1, BCAT1, PRF1, DBN1, MT1K, TMSB10, FLJ10350, C1orf24, NME7, TMEM22, TPK1, COL5A2, ELK3, CYLD, ADAMTS1, EHD2, and ACTB, whose expression indicates chemosensitivity to Bleomycin.
q) One or more of the gene sequences NOS2A, MUC1, TFF3, GP1BB, IGLL1, BATF, MYB, PTPRS, NEFL, AIP, CEL, DGKA, RUNX1, ACTR1A, and CLCNKA, preferably gene sequences PTMA, SSRP1, NUDC, CTSC, AP1G2, PSME2, LBR, EFNB2, SERPINA1, SSSCA1, EZH2, MYB, PRIM1, H2AFX, HMGA1, HMMR, TK2, WHSC1, DIAPH1, LAMB3, DPAGT1, UCK2, SERPINB1, MDN1, BRRN1, GOS2, RAC2, MGC21654, GTSE1, TACC3, PLEK2, PLAC8, HNRPD, and PNAS-4, and most preferably gene sequences SSRP1, NUDC, CTSC, AP1G2, PSME2, LBR, EFNB2, SERPINA1, SSSCA1, EZH2, MYB, PRIM1, H2AFX, HMGA1, HMMR, TK2, WHSC1, DIAPH1, LAMB3, DPAGT1, UCK2, SERPINB1, MDN1, BRRN1, GOS2, RAC2, MGC21654, GTSE1, TACC3, PLEK2, PLAC8, HNRPD, and PNAS-4, whose expression indicates chemosensitivity to Methyl-GAG.
r) One or more of the gene sequences MSN, ITGA5, VIM, TNFAIP3, CSPG2, WNT5A, FOXF2, LOC94105, IFI16, LRRN3, FGFR1, DOCK10, LEPRE1, COL5A2, and ADAMTS1, and most preferably gene sequences ITGA5, TNFAIP3, WNT5A, FOXF2, LOC94105, IFI16, LRRN3, DOCK10, LEPRE1, COL5A2, and ADAMTS1, whose expression indicates chemosensitivity to carboplatin.
s) One or more of the gene sequences RPL18, RPL10A, RNPS1, ANAPC5, EEF1B2, RPL13A, RPS15, AKAP1, NDUFAB1, APRT, ZNF593, MRP63, IL6R, RPL13, SART3, RPS6, UCK2, RPL3, RPL17, RPS2, PCCB, TOMM20, SHMT2, RPLP0, GTF3A, STOML2, DKFZp564J157, MRPS2, ALG5, and CALML4, and most preferably gene sequences RPL18, RPL10A, ANAPC5, EEF1B2, RPL13A, RPS15, AKAP1, NDUFAB1, APRT, ZNF593, MRP63, IL6R, SART3, UCK2, RPL17, RPS2, PCCB, TOMM20, SHMT2, RPLP0, GTF3A, STOML2, DKFZp564J157, MRPS2, ALG5, and CALML4, whose expression indicates chemosensitivity to 5-FU(5-Fluorouracil).
t) One or more of the gene sequences ITK, KIFC1, VLDLR, RUNX1, PAFAH1B3, H1FX, RNF144, TMSNB, CRY1, MAZ, SLA, SRF, UMPS, CD3Z, PRKCQ, HNRPM, ZAP70, ADD1, RFC5, TM4SF2, PFN2, BMI1, TUBGCP3, ATP6V1B2, RALY, PSMC5, CD1D, ADA, CD99, CD2, CNP, ERG, MYL6, CD3E, CD1A, CD1B, STMN1, PSMC3, RPS4Y1, AKT1, TAL1, GNA15, UBE2A, TCF12, UBE2S, CCND3, PAX6, MDK, CAPG, RAG2, ACTN1, GSTM2, SATB1, NASP, IGFBP2, CDH2, CRABP1, DBN1, CTNNA1, AKR1C1, CACNB3, FARSLA, CASP2, CASP2, E2F4, LCP2, CASP6, MYB, SFRS6, GLRB, NDN, CPSF1, GNAQ, TUSC3, GNAQ, JARID2, OCRL, FHL1, EZH2, SMOX, SLC4A2, UFD1L, SEPW1, ZNF32, HTATSF1, SHD1, PTOV1, NXF1, FYB, TRIM28, BC008967, TRB@, TFRC, H1F0, CD3D, CD3G, CENPB, ALDH2, ANXA1, H2AFX, CD1E, DDX5, ABL1, CCNA2, ENO2, SNRPB, GATA3, RRM2, GLUL, TCF7, FGFR1, SOX4, MAL, NUCB2, SMA3, FAT, UNG, ARHGDIB, RUNX1, MPHOSPH6, DCTN1, SH3GL3, VIM, PLEKHC1, CD47, POLR2F, RHOH, ADD1, and ATP2A3, preferably gene sequences ITK, KIFC1, VLDLR, RUNX1, PAFAH1B3, H1FX, RNF144, TMSNB, CRY1, MAZ, SLA, SRF, UMPS, CD3Z, PRKCQ, HNRPM, ZAP70, ADD1, RFC5, TM4SF2, PFN2, BMI1, TUBGCP3, ATP6V1B2, RALY, PSMC5, CD1D, ADA, CD99, CD2, CNP, ERG, MYL6, CD3E, CD1A, CD1B, STMN1, PSMC3, RPS4Y1, AKT1, TAL1, GNA15, UBE2A, TCF12, UBE2S, CCND3, PAX6, MDK, CAPG, RAG2, ACTN1, GSTM2, SATB1, NASP, IGFBP2, CDH2, CRABP1, DBN1, CTNNA1, AKR1C1, CACNB3, FARSLA, CASP2, CASP2, E2F4, LCP2, CASP6, MYB, SFRS6, GLRB, NDN, CPSF1, GNAQ, TUSC3, GNAQ, JARID2, OCRL, FHL1, EZH2, SMOX, SLC4A2, UFD1L, SEPW1, ZNF32, HTATSF1, SHD1, PTOV1, NXF1, FYB, TRIM28, BC008967, TRB@, TFRC, H1F0, CD3D, CD3G, CENPB, ALDH2, ANXA1, H2AFX, CD1E, DDX5, ABL1, CCNA2, ENO2, SNRPB, GATA3, RRM2, GLUL, TCF7, FGFR1, SOX4, MAL, NUCB2, SMA3, FAT, UNG, ARHGDIB, RUNX1, MPHOSPH6, DCTN1, SH3GL3, VIM, PLEKHC1, CD47, POLR2F, RHOH, ADD1, and ATP2A3, and most preferably gene sequences KIFC1, VLDLR, RUNX1, PAFAH1B3, H1FX, RNF144, TMSNB, CRY1, MAZ, SLA, SRF, UMPS, CD3Z, PRKCQ, HNRPM, ZAP70, ADD1, RFC5, TM4SF2, PFN2, BMI1, TUBGCP3, ATP6V1B2, CD1D, ADA, CD99, CD2, CNP, ERG, CD3E, CD1A, PSMC3, RPS4Y1, AKT1, TAL1, UBE2A, TCF12, UBE2S, CCND3, PAX6, RAG2, GSTM2, SATB1, NASP, IGFBP2, CDH2, CRABP1, DBN1, AKR1C1, CACNB3, CASP2, CASP2, LCP2, CASP6, MYB, SFRS6, GLRB, NDN, GNAQ, TUSC3, GNAQ, JARID2, OCRL, FHL1, EZH2, SMOX, SLC4A2, UFD1L, ZNF32, HTATSF1, SHD1, PTOV1, NXF1, FYB, TRIM28, BC008967, TRB@, H1F0, CD3D, CD3G, CENPB, ALDH2, ANXA1, H2AFX, CD1E, DDX5, CCNA2, ENO2, SNRPB, GATA3, RRM2, GLUL, SOX4, MAL, UNG, ARHGDIB, RUNX1, MPHOSPH6, DCTN1, SH3GL3, PLEKHC1, CD47, POLR2F, RHOH, and ADD1, whose expression indicates chemosensitivity to Rituximab (e.g., MABTHERA™).
u) One or more of the gene sequences CCL21, ANXA2, SCARB2, MAD2L1BP, CAST, PTS, NBL1, ANXA2, CD151, TRAM2, HLA-A, CRIP2, UGCG, PRSS11, MME, CBR1, LGALS1, DUSP3, PFN2, MICA, FTH1, RHOC, ZAP128, PON2, COL5A2, CST3, MCAM, IGFBP3, MMP2, GALIG, CTSD, ALDH3A1, CSRP1, S100A4, CALD1, CTGF, CAPG, HLA-A, ACTN1, TAGLN, FSTL1, SCTR, BLVRA, COPEB, DIPA, SMARCD3, FN1, CTSL, CD63, DUSP1, CKAP4, MVP, PEA15, S100A13, and ECE1, preferably gene sequences TRA1, ACTN4, WARS, CALM1, CD63, CD81, FKBP1A, CALU, IQGAP1, CTSB, MGC8721, STAT1, TACC1, TM4SF8, CD59, CKAP4, DUSP1, RCN1, MGC8902, LGALS1, BHLHB2, RRBP1, PKM2, PRNP, PPP2CB, CNN3, ANXA2, ER3, JAK1, MARCKS, LUM, FER1L3, SLC20A1, EIF4G3, HEXB, EXT1, TJP1, CTSL, SLC39A6, RIOK3, CRK, NNMT, COL1A1, TRAM2, ADAM9, DNAJC7, PLSCR1, PRSS23, PLOD2, NPC1, TOB1, GFPT1, IL8, DYRK2, PYGL, LOXL2, KIAA0355, UGDH, NFIL3, PURA, ULK2, CENTG2, NID2, CAP350, CXCL1, BTN3A3, IL6, WNT5A, FOXF2, LPHN2, CDH11, P4HA1, GRP58, ACTN1, CAPN2, DSIPI, MAP1LC3B, GALIG, IGSF4, IRS2, ATP2A2, OGT, TNFRSF10B, KIAA1128, TM4SF1, RBPMS, RIPK2, CBLB, NR1D2, BTN3A2, SLC7A11, MPZL1, IGFBP3, SSA2, FN1, NQO1, ASPH, ASAH1, MGLL, SERPINB6, HSPA5, ZFP36L1, COL4A2, COL4A1, CD44, SLC39A14, NIPA2, FKBP9, IL6ST, DKFZP564G2022, PPAP2B, MAP1B, MAPK1, MYO1B, CAST, RRAS2, QKI, LHFPL2, 38970, ARHE, KIAA1078, FTL, KIAA0877, PLCB1, KIAA0802, KPNB1, RAB3GAP, SERPINB1, TIMM17A, SOD2, HLA-A, NOMO2, LOC55831, PHLDA1, TMEM2, MLPH, FAD104, LRRC5, RAB7L1, FLJ35036, DOCK10, LRP12, TXNDC5, CDCl₄B, HRMT1L1, CORO1C, DNAJC10, TNPO1, LONP, AMIGO2, DNAPTP6, and ADAMTS1, and most preferably gene sequences TRA1, ACTN4, CALM1, CD63, FKBP1A, CALU, IQGAP1, MGC8721, STAT1, TACC1, TM4SF8, CD59, CKAP4, DUSP1, RCN1, MGC8902, LGALS1, BHLHB2, RRBP1, PRNP, IER3, MARCKS, LUM, FER1L3, SLC20 μl, HEXB, EXT1, TJP1, CTSL, SLC39A6, RIOK3, CRK, NNMT, TRAM2, ADAM9, DNAJC7, PLSCR1, PRSS23, PLOD2, NPC1, TOB1, GFPT1, IL8, PYGL, LOXL2, KIAA0355, UGDH, PURA, ULK2, CENTG2, NID2, CAP350, CXCL1, BTN3A3, IL6, WNT5A, FOXF2, LPHN2, CDH11, P4HA1, GRP58, DSIPI, MAP1LC3B, GALIG, IGSF4, IRS2, ATP2A2, OGT, TNFRSF10B, KIAA1128, TM4SF1, RBPMS, RIPK2, CBLB, NR1D2, SLC7A11, MPZL1, SSA2, NQO1, ASPH, ASAH1, MGLL, SERPINB6, HSPA5, ZFP36L1, COL4A1, CD44, SLC39A14, NIPA2, FKBP9, IL6ST, DKFZP564G2022, PPAP2B, MAP1B, MAPK1, MYO1B, CAST, RRAS2, QKI, LHFPL2, 38970, ARHE, KIAA1078, FTL, KIAA0877, PLCB1, KIAA0802, RAB3GAP, SERPINB1, TIMM17A, SOD2, HLA-A, NOMO2, LOC55831, PHLDA1, TMEM2, MLPH, FAD104, LRRC5, RAB7L1, FLJ35036, DOCK10, LRP12, TXNDC5, CDCl₄B, HRMT1L1, CORO1C, DNAJC10, TNPO1, LONP, AMIGO2, DNAPTP6, and ADAMTS1, whose expression indicates sensitivity to radiation therapy.
v) One or more of the gene sequences FAU, NOL5A, ANP32A, ARHGDIB, LBR, FABP5, ITM2A, SFRS5, IQGAP2, SLC7A6, SLA, IL2RG, MFNG, GPSM3, PIM2, EVER1, LRMP, ICAM2, RIMS3, FMNL1, MYB, PTPN7, LCK, CXorf9, RHOH, ZNFN1A1, CENTB1, LCP2, DBT, CEP1, IL6R, VAV1, MAP4K1, CD28, PTP4A3, CD3G, LTB, USP34, NVL, CD8B1, SFRS6, LCP1, CXCR4, PSCDBP, SELPLG, CD3Z, PRKCQ, CD1A, GATA2, P2RX5, LAIR1, C1orf38, SH2D1A, TRB@, SEPT6, HA-1, DOCK2, WBSCR20C, CD3D, RNASE6, SFRS7, WBSCR20A, NUP210, CD6, HNRPA1, AIF1, CYFIP2, GLTSCR2, C11orf2, ARHGAP15, BIN2, SH3TC1, STAG3, TM6SF1, C15orf25, FLJ22457, PACAP, and MGC2744, whose expression indicates sensitivity to an HDAC inhibitor.
w) One or more of the gene sequences CD99, SNRPA, CUGBP2, STAT5A, SLA, IL2RG, GTSE1, MYB, PTPN7, CXorf9, RHOH, ZNFN1A1, CENTB1, LCP2, HIST1H4C, CCR7, APOBEC3B, MCM7, LCP1, SELPLG, CD3Z, PRKCQ, GZMB, SCN3A, LAIR1, SH2D1A, SEPT6, CG018, CD3D, C18orf10, PRF1, AIF1, MCM5, LPXN, C22orf18, ARHGAP15, and LEF1, whose expression indicates sensitivity to 5-Aza-2′-deoxycytidine (Decitabine).

[0052] Probes that may be employed on microarrays of the invention include oligonucleotide probes having sequences complementary to any of the biomarker gene or microRNA sequences described above. Additionally, probes employed on microarrays of the invention may also include proteins, peptides, or antibodies that selectively bind any of the oligonucleotide probe sequences or their complementary sequences. Exemplary probes are listed in Tables 22-44, wherein for each treatment listed, the biomarkers indicative of treatment sensitivity, the correlation of biomarker expression to growth inhibition, and the sequence of an exemplary probe (Tables 22-44) to detect biomarker (Tables 1-21) expression are shown.

### Identification of Biomarker Genes

[0053] The gene expression measurements of the NCI60 cancer cell lines were obtained from the National Cancer Institute and the Massachusetts Institute of Technology (MIT). Each dataset was normalized so that sample expression measured by different chips could be compared. The preferred method of normalization is the logit transformation, which is performed for each gene y on each chip:

logit(y)=log[(y−background)/(saturation−y)],

where background is calculated as the minimum intensity measured on the chip minus 0.1% of the signal intensity range: min-0.001*(max-min), and saturation is calculated as the maximum intensity measured on the chip plus 0.1% of the signal intensity range: max+0.001*(max-min). The resulting logit transformed data is then z-transformed to mean zero and standard deviation 1.

[0054] Next, gene expression is correlated to cancer cell growth inhibition. Growth inhibition data (GI50) of the NCI60 cell lines in the presence of any one of thousands of tested compounds was obtained from the NCI. The correlation between the logit-transformed expression level of each gene in each cell line and the logarithm of GI50 (the concentration of a given compound that results in a 50% inhibition of growth) can be calculated, e.g., using the Pearson correlation coefficient or the Spearman Rank-Order correlation coefficient. Instead of using GI50s, any other measure of patient sensitivity to a given compound may be correlated to the patient's gene expression. Since a plurality of measurements may be available for a single gene, the most accurate determination of correlation coefficient was found to be the median of the correlation coefficients calculated for all probes measuring expression of the same gene.

[0055] The median correlation coefficient of gene expression measured on a probe to growth inhibition or patient sensitivity is calculated for all genes, and genes that have a median correlation above 0.3, 0.4, 0.5, 0.6, 0.7, 0.8, 0.9, 0.95, or 0.99 are retained as biomarker genes. Preferably, the correlation coefficient of biomarker genes will exceed 0.3. This is repeated for all the compounds to be tested. The result is a list of marker genes that correlates to sensitivity for each compound tested.

### Predicting Patient Sensitivity or Resistance to Medical Treatment

[0056] For a given compound, the biomarker whose expression has been shown to correlate to chemosensitivity can be used to classify a patient, e.g., a cancer patient, as sensitive to a medical treatment, e.g., administration of a chemotherapeutic agent or radiation. Using a tumor sample or a blood sample (e.g., in case of leukemia or lymphoma) from a patient, expression of the biomarker in the cells of the patient in the presence of the treatment agent is determined (using, for example, an RNA extraction kit, a DNA microarray and a DNA microarray scanner). The biomarker expression measurements are then logit transformed as described above. The sum of the expression measurements of the biomarkers is then compared to the median of the sums derived from a training set population of patients having the same tumor. If the sum of biomarker expression in the patient is closest to the median of the sums of expression in the surviving members of the training set, the patient is predicted to be sensitive to the compound or other medical treatment. If the sum of expression in the patient is closest to the median of the sums of expression in the non-surviving members of the training set, the patient is predicted to be resistant to the compound.

[0057] Machine learning techniques such as Neural Networks, Support Vector Machines, K Nearest Neighbor, and Nearest Centroids may also be employed to develop models that discriminate patients sensitive to treatment from those resistant to treatment using biomarker expression as model variables which assign each patient a classification as resistant or sensitive. Machine learning techniques used to classify patients using various measurements are described in U.S. Pat. No. 5,822,715; U.S. Patent Application Publication Nos. 2003/0073083, 2005/0227266, 2005/0208512, 2005/0123945, 2003/0129629, and 2002/0006613; and in Vapnik V N. Statistical Learning Theory, John Wiley & Sons, New York, 1998; Hastie et al., 2001, The Elements of Statistical Learning: Data Mining, Inference, and Prediction, Springer, N.Y.; Agresti, 1996, An Introduction to Categorical Data Analysis, John Wiley & Sons, New York; and V. Tresp et al., “Neural Network Modeling of Physiological Processes”, in Hanson S. J. et al. (Eds.), Computational Learning Theory and Natural Learning Systems 2, MIT Press, 1994, hereby incorporated by reference.

[0058] Other variables can be used to determine relative biomarker expression between a patient (e.g., a cancer patient) and a normal subject (e.g., a control subject), including but not limited to, measurement of biomarker DNA copy number and the identification of biomarker genetic mutations.

[0059] A more compact microarray can be designed using only the oligonucleotide probes having measurements yielding the median correlation coefficients with cancer cell growth inhibition. Thus, in this embodiment, only one probe needs to be used to measure expression of each biomarker. Biomarkers include polypeptides and metabolites thereof. A skilled artisan can use employ assays that measure changes in polypeptide biomarker expression (e.g., Western blot, immunofluorescent staining, and flow cytometry) to determine a patient's sensitivity to a treatment (e.g., chemotherapy, radiation therapy, or surgery).

### Identifying a Subpopulation of Patients Sensitive to a Treatment for Cancer

[0060] The invention can also be used to identify a subpopulation of patients, e.g., cancer patients, that are sensitive to a compound or other medical treatment previously thought to be ineffective for the treatment of cancer. To this end, genes or microRNAs whose expression correlates to sensitivity to a compound or other treatment can be identified so that patients sensitive to a compound or other treatment may be identified. To identify such biomarkers, gene or microRNA expression within cell lines can be correlated to the growth of those cell lines in the presence of the same compound or other treatment. Preferably, genes or microRNAs whose expression correlates to cell growth with a correlation coefficient exceeding 0.3 may be considered possible biomarkers.

[0061] Alternatively, genes or microRNAs can be identified as biomarkers according to their ability to discriminate patients known to be sensitive to a treatment from those known to be resistant. The significance of the differences in gene or microRNA expression between the sensitive and resistant patients may be measured using, e.g., t-tests. Alternatively, naïve Bayesian classifiers may be used to identify gene biomarkers that discriminate sensitive and resistant patient subpopulations given the gene expressions of the sensitive and resistant subpopulations within a treated patient population.

[0062] The patient subpopulations considered can be further divided into patients predicted to survive without treatment, patients predicted to die without treatment, and patients predicted to have symptoms without treatment. The above methodology may be similarly applied to any of these further defined patient subpopulations to identify biomarkers able to predict a subject's sensitivity to compounds or other treatments for the treatment of cancer.

[0063] Patients with elevated expression of biomarkers correlated to sensitivity to a compound or other medical treatment would be predicted to be sensitive to that compound or other medical treatment.

[0064] The invention is particularly useful for recovering compounds or other treatments that failed in clinical trials by identifying sensitive patient subpopulations using the gene or microRNA expression methodology disclosed herein to identify biomarkers that can be used to predict clinical outcome.

### Kit, Apparatus, and Software for Clinical Use

[0065] This invention can also be used to predict patients who are resistant or sensitive to a particular treatment by using a kit that includes a kit for RNA extraction from tumors (e.g., Trizol from Invitrogen Inc.), a kit for RNA amplification (e.g., MessageAmp from Ambion Inc.), a microarray for measuring biomarker expression (e.g., HG-U133A GeneChip from Affymetrix Inc.), a microarray hybridization station and scanner (e.g., GeneChip System 3000Dx from Affymetrix Inc.), and software for analyzing the expression of marker genes as described in herein (e.g., implemented in R from R-Project or S-Plus from Insightful Corp.).

### Methodology of the In Vitro Cancer Growth Inhibition Screen

[0066] The human tumor cell lines of the cancer screening panel are grown in RPMI 1640 medium containing 5% fetal bovine serum and 2 mM L-glutamine. Cells are inoculated into 96 well microtiter plates in 100 μL at plating densities ranging from 5,000 to 40,000 cells/well depending on the doubling time of individual cell lines. After cell inoculation, the microtiter plates are incubated at 37° C., 5% CO₂, 95% air, and 100% relative humidity for 24 hrs prior to addition of experimental compounds.

[0067] After 24 hrs, two plates of each cell line are fixed in situ with TCA, to represent a measurement of the cell population for each cell line at the time of compound addition (Tz). Experimental compounds are solubilized in dimethyl sulfoxide at 400-fold the desired final maximum test concentration and stored frozen prior to use. At the time of compound addition, an aliquot of frozen concentrate is thawed and diluted to twice the desired final maximum test concentration with complete medium containing 50 μg/mL Gentamicin. Additional four, 10-fold or V2 log serial dilutions are made to provide a total of five compound concentrations plus control. Aliquots of 100 μL of these different compound dilutions are added to the appropriate microtiter wells already containing 100 μL of medium, resulting in the required final compound concentrations.

[0068] Following compound addition, the plates are incubated for an additional 48 hrs at 37° C., 5% CO₂, 95% air, and 100% relative humidity. For adherent cells, the assay is terminated by the addition of cold TCA. Cells are fixed in situ by the gentle addition of 50 μL of cold 50% (w/v) TCA (final concentration, 10% TCA) and incubated for 60 min at 4° C. The supernatant is discarded, and the plates are washed five times with tap water and air-dried. Sulforhodamine B (SRB) solution (100 μL) at 0.4% (w/v) in 1% acetic acid is added to each well, and plates are incubated for 10 min at room temperature. After staining, unbound dye is removed by washing five times with 1% acetic acid and the plates are air-dried. Bound stain is subsequently solubilized with 10 mM trizma base, and the absorbance is read on an automated plate reader at a wavelength of 515 nm. For suspension cells, the methodology is the same except that the assay is terminated by fixing settled cells at the bottom of the wells by gently adding 50 μL of 80% TCA (final concentration, 16% TCA). Using the seven absorbance measurements [time zero, (Tz), control growth, (C), and test growth in the presence of compound at the five concentration levels (Ti)], the percentage growth is calculated at each of the compound concentrations levels. Percentage growth inhibition is calculated as:

[(Ti−Tz)/(C−Tz)]×100 for concentrations for which Ti>/=Tz

[(Ti−Tz)/Tz]×100 for concentrations for which Ti<Tz

[0069] Three dose response parameters are calculated for each experimental agent. Growth inhibition of 50% (GI50) is calculated from [(Ti−Tz)/(C−Tz)]×100=50, which is the compound concentration resulting in a 50% reduction in the net protein increase (as measured by SRB staining) in control cells during the compound incubation. The compound concentration resulting in total growth inhibition (TGI) is calculated from Ti=Tz. The LC50 (concentration of compound resulting in a 50% reduction in the measured protein at the end of the compound treatment as compared to that at the beginning) indicating a net loss of cells following treatment is calculated from [(Ti−Tz)/Tz]×100=−50. Values are calculated for each of these three parameters if the level of activity is reached; however, if the effect is not reached or is exceeded, the value for that parameter is expressed as greater or less than the maximum or minimum concentration tested.

### RNA Extraction and Gene Expression Measurement

[0070] Cell/tissue samples are snap frozen in liquid nitrogen until processing. RNA is extracted using e.g., Trizol Reagent (Invitrogen) following manufacturers instructions. RNA is amplified using e.g., MessageAmp kit (Ambion) following manufacturers instructions. Amplified RNA is quantified using e.g., HG-U133A GeneChip (Affymetrix) and compatible apparatus e.g., GCS3000Dx (Affymetrix), using manufacturers instructions.

[0071] The resulting gene expression measurements are further processed as described in this document. The procedures described can be implemented using R software available from R-Project and supplemented with packages available from Bioconductor.

[0072] For many drugs 10-30 biomarkers are sufficient to give an adequate response, thus, given the relatively small number of biomarkers required, procedures, such as quantitative reverse transcriptase polymerase chain reaction (qRT-PCR), can be performed to measure, with greater precision, the amount of biomarker genes expressed in a sample. This will provide an alternative to or a complement to microarrays so that a single companion test, typically more quantitative than microarrays alone, employing biomarkers of the invention can be used to predict sensitivity to a new drug. qRT-PCR can be performed alone or in combination with a microarray described herein. Procedures for performing qRT-PCR are described in, e.g., U.S. Pat. No. 7,101,663 and U.S. Patent Application Nos. 2006/0177837 and 2006/0088856. The methods of the invention are readily applicable to newly discovered drugs as well as drugs described herein.

[0073] The following examples are provided so that those of ordinary skill in the art can see bow to use the methods and kits of the invention. The examples are not intended to limit the scope of what the inventor regards as their invention.

### EXAMPLES

### Example 13

### Identification of Gene Biomarkers for Chemosensitivity to Common Chemotherapy Drugs

[0074] DNA chip measurements of the 60 cancer cell lines of the NCI60 data set were downloaded from the Broad Institute (Cambridge, Mass.) and logit normalized. Growth inhibition data of thousands of compounds against the same cell lines were downloaded from the National Cancer Institute. Compounds where the difference concentration to achieve 50% in growth inhibition (GI50) was less than 1 log were deemed uninformative and rejected. Each gene's expression in each cell line was correlated to its growth (−log(GI50)) in those cell lines in the presence of a given compound. The median Pearson correlation coefficient was used when multiple expression measurements were available for a given gene, and genes having a median correlation coefficient greater than 0.3 were identified as biomarkers for a given compound.

### Example 2

### Prediction of Treatment Sensitivity for Brain Cancer Patients

[0075] DNA chip measurements of gene expression in tumors from 60 brain cancer patients were downloaded from the Broad Institute. All data files were logit normalized. For each of the common chemotherapy drugs Cisplatin, Vincristine, Adriamycine, Etoposide, Aclarubicine, Mitoxantrone and Azaguanine, the gene expression for the marker genes was summed. The sum was normalized by dividing by the standard deviation of all patients and compared to the median of the sums of patients who survived and the median of the sums of patients who died:

$$NormalizedSum ( compound ) = \frac{sum ( marker genes for compound )}{sd ( sums of all patients )}$$

$$Sensitivity ( compound ) = {[ \begin{matrix}NormalizedSum ( compound ) - \\ median ( NormalizedSumdeadpatients ( compound ) )\end{matrix} ]}^{2} - {[ \begin{matrix}NormalizedSum ( compound ) - \\ median ( NormalizedSumsurvivingpatients ( compound ) )\end{matrix} ]}^{2}$$

[0076] FIGS. 2 and 3 show the resulting treatment sensitivity predictions for two of the 60 patients. All patients received Cisplatin and the prediction of survival amongst the 60 patients based on their Cisplatin chemosensitivity yielded the Kaplan-Meier survival curve shown in FIG. 4. The expression of the 16 Cisplatin biomarker genes was first reduced to 5 components (dimensions) using Independent Component Analysis (fastICA). Five different classification methods were trained on the five components from the 60 patients: K Nearest Neighbor with K=1, K Nearest Neighbor with K=3, Nearest Centroid, Support Vector Machine, and Neural Network. Chemosensitivity or sensitivity to radiation treatment was predicted by combining the classifications of the five methods wherein each classification method was assigned a single vote: unanimous chemosensitive/treatment sensitive prediction resulted in a prediction of chemosensitive/treatment sensitive. All other predictions resulted in a prediction of chemoresistant/treatment resistant. The performance of the combined classifier was validated using leave-one-out cross validation and the survival of the two predicted groups shown in FIG. 4. The survival rate of the patients predicted to be chemosensitive was higher than the patients predicted to be chemoresistant.

### Example 3

### Prediction of Chemosensitivity for Lymphoma (DLBCL) Patients

[0077] DNA chip measurements of gene expression in the tumors from 56 DLBCL (diffuse large B-cell lymphoma) patients were downloaded from the Broad Institute. All data files were logit normalized. All patients received Vincristine and Adriamycine and the prediction of survival amongst the 56 patients based on their Vincristine and Adriamycine chemosensitivity yielded the Kaplan-Meier survival curve shown in FIG. 5. The expression of the 33 Vincristine genes and 16 Adriamycine genes was first reduced to 3 components (dimensions) using Independent Component Analysis (fastICA). Five different classification methods were trained on the independent components from the 56 patients: K Nearest Neighbor with K=1, K Nearest Neighbor with K=3, Nearest Centroid, Support Vector Machine, and Neural Network. Chemosensitivity was predicted by combining the classifications of the five methods wherein each classification method was assigned a single vote: unanimous chemosensitive prediction resulted in a prediction of chemosensitive. All other predictions resulted in a prediction of chemoresistant. The performance of the combined classifier was validated using leave-one-out cross validation and the survival of the two predicted groups is shown in FIG. 5. The survival rate of the patients predicted to be chemosensitive was higher than the patients predicted to be chemoresistant.

### Example 4

### Prediction of Chemosensitivity for Lung Cancer Patients

[0078] DNA chip measurements of gene expression in the tumors from 86 lung cancer (adenocarcinoma) patients was downloaded from the University of Michigan, Ann Arbor. Of the 86 patients, 19 had Stage III of the disease and received adjuvant chemotherapy. Raw data was logit normalized. Instead of the combined classifier described for the brain cancer and lymphoma examples above, the sum of biomarker gene expression was calculated for each patient and used to discriminate chemosensitive and chemoresistant patients. For each patient, the gene expression of the 16 marker genes for Cisplatin sensitivity (all Stage III patients received Cisplatin after surgery) was summed. If the sum was closer to the median of the sums of the surviving patients, the patient was predicted to be sensitive to Cisplatin. If the sum was closest to the median of the sums of the non-surviving patients, the patient was predicted to be resistant to Cisplatin. The survival rates of the two predicted groups are shown in FIG. 6. The survival rate of the patients predicted to be chemosensitive was higher than the patients predicted to be chemoresistant.

### Example 5

### Prediction of Rituximab Sensitivity for Lymphoma (DLBCL) Patients

[0079] The method is not limited to cytotoxic chemicals. It is also applicable to predicting the efficacy of protein therapeutics, such as monoclonal antibodies, approved for treating cancer. For example, the monoclonal antibody Rituximab (e.g., MABTHERA™ and RITUXAN™) was examined. Data for cytotoxicity of Rituximab in cell lines in vitro were obtained from published reports (Ghetie et al., Blood 97(5):1392-1398, 2001). This cytotoxicity in each cell line was correlated to the expression of genes in these cell lines (downloaded from the NCBI Gene Expression Omnibus database using accession numbers GSE2350, GSE1880, GDS181). The identified marker genes were used to predict the sensitivity of DLBCL to Rituximab in a small set of 14 patients treated with Rituximab and CHOP(R—CHOP) (downloaded from NCBI Gene Expression Omnibus under accession number GSE4475). Conversion between different chip types was performed using matching tables available through Affymetrix.

[0080] The survival of patients predicted to be sensitive to be R-CHOP is compared to the survival of patients predicted to be resistant to R-CHOP in FIG. 7. The survival rate of the patients predicted to be chemosensitive was higher than the patients predicted to be chemoresistant.

[0081] To predict the sensitivity toward combination therapies, such as those used to treat Diffuse Large B-cell Lymphoma (DLBCL), patient sensitivity to a particular combination therapy is predicted by combining the marker genes for the individual compounds used in the combination. An example of this is shown in FIG. 8, where the predicted sensitivities of one patient towards a number of combination therapies used against DLBCL (identified by their acronyms) are shown: R-CHOP contains Rituximab (e.g., MABTHERA™), Vincristine, Doxorubicin (Adriamycin), Cyclophosphamide, and Prednisolone; R-ICE contains Rituximab, Ifosfamide, Carboplatin, and Etoposide; R-MIME contains Rituximab, Mitoguazone, Ifosfamide, Methotrexate, and Etoposide; CHOEP contains Cyclophosphamide, Doxorubicin, Etoposide, Vincristine and Prednisone; DHAP contains Dexamethasone, Cytarabine (Ara C), and Cisplatin; ESHAP contains Etoposide, Methylprednisolone (Solumedrol), Cytarabine (Ara-C) and Cisplatin; and HOAP-Bleo contains Doxorubicin, Vincristine, Ara C, Prednisone, and Bleomycin.

### Example 6

### Prediction of Radiosensitivity for Brain Tumor (Medulloblastoma) Patients

[0082] The method of identifying biomarkers can also be applied to other forms of treatment such as radiation therapy. For example, sensitivity to radiation therapy was predicted for brain tumor patients. Radiation therapy in the form of craniospinal irradiation yielding 2,400-3,600 centigray (cGy) with a tumor dose of 5,300-7,200 cGy was administered to the brain tumor patients using a medical device that emits beams of radiation. Sensitivity of the 60 cancer cell lines used in the NCI60 dataset to radiation treatment was obtained from published reports. This sensitivity was correlated to the expression of genes in the cell lines as described above to identify marker genes. DNA microarray measurements of gene expression in brain tumors obtained from patients subsequently treated with radiation therapy were obtained from the Broad Institute. The identified gene biomarkers were used to classify the patients as sensitive or resistant to radiation therapy. The survival of the patients in the two predicted categories is shown in FIG. 9. The survival rate of the patients predicted to be sensitive to radiation therapy was higher than the patients predicted to be resistant to radiation therapy.

### Example 7

### Drug Rescue

[0083] Every member of a population may not be equally responsive to a particular treatment. For example, new compounds often fail in late clinical trials because of lack of efficacy in the population tested. While such compounds may not be effective in the overall population, there may be subpopulations sensitive to those failed compounds due to various reasons, including inherent differences in gene expression. The method as described herein can be used to rescue failed compounds by identifying a patient subpopulation sensitive to a compound using their gene expression as an indicator. Subsequent clinical trials restricted to a sensitive patient subpopulation may demonstrate efficacy of a previously failed compound within that particular patient subpopulation, advancing the compound towards approval for use in that subpopulation.

[0084] To this end, in vitro measurements of the inhibitory effects of a compound on various cancer cell lines are compared to the gene expression of cells. The growth of the cancer cell samples can be correlated to gene expression measurements as described above. This will identify marker genes that can be used to predict patient sensitivity to the failed compound. Once biomarkers are identified, the expression of biomarker genes in cells obtained from patients can be measured according to the procedure detailed above. The patients are predicted to be responsive or non-responsive to compound treatment according to their gene biomarker expression profile. Clinical effect must then be demonstrated in the group of patients that are predicted to be sensitive to the failed compound.

[0085] The method may be further refined if patients responsive to the compound treatment are further subdivided into those predicted to survive without the compound and those predicted to die or suffer a relapse without the compound. Clinical efficacy in the subpopulation that is predicted to die or suffer relapse can be further demonstrated. Briefly, the gene expression at the time of diagnosis of patients who later die from their disease is compared to gene expression at the time of diagnosis of patients who are still alive after a period of time (e.g., 5 years). Genes differentially expressed between the two groups are identified as prospective biomarkers and a model is built using those gene biomarkers to predict treatment efficacy.

[0086] Examples of compounds that have failed in clinical trials include Gefinitib (e.g., Iressa, AstraZeneca) in refractory, advanced non-small-cell lung cancer (NSCLC), Bevacizumab (e.g., Avastin, Genentech) in first-line treatment for advanced pancreatic cancer, Bevacizumab (e.g., Avastin, Genentech) in relapsed metastatic breast cancer patients, and Erlotinib (e.g., Tarceva, Genentech) in metastatic non-small cell lung cancer (NSCLC). The method of the invention may be applied to these compounds, among others, so that sensitive patient subpopulations responsive to those compounds may be identified.

### Example 8

### Median of the Correlations Versus Correlation of the Median

[0087] The median of the correlations of the individual probe measurements to cancer cell growth as employed by the invention was compared to the correlation of the median probe measurements: this will determine at which step of the method a median calculation should be performed. In the former, several correlations are calculated for each gene since multiple probes measure a given gene's expression, but only the median of the correlation coefficients is finally retained to identify biomarkers. In the latter, only one correlation is calculated for each gene because only the median gene expression measurement is considered for each gene. FIG. 10 shows the results of using the correlation of the median expression measurements to identify biomarker genes of radiation sensitivity predicting the survival of 60 brain cancer patients. The difference in survival between the group predicted to be radiation sensitive and the group predicted to be radiation resistant in FIG. 10 is much smaller than the difference depicted in FIG. 9 which employed a median correlation coefficient suggesting that the invention's median of the correlations employed in FIG. 9 outperforms the correlation of the median depicted in FIG. 10.

[0088] If we look at individual marker genes like OMD, the median of the correlation to measured radiosensitivity of cell lines in vitro is 0.32. The correlation of the median, however, is 0.39. Adjusting the cutoff from 0.3 to 0.4 to compensate for the difference does not improve on FIG. 10, however.

[0089] We have also compared median correlation to weighted voting as proposed by Staunton et al., PNAS 98(19):10787-10792, 2001). Weighted voting produced a poor result similar to that of FIG. 10, with a P-value of 0.11.

### Example 9

### Other Methods of Identifying Biomarkers

[0090] The examples shown above all rely on the availability of measurements of inhibition by a compound or treatment of the growth of cell lines in vitro. Such measurements may not always be available or practical. In that case an alternative method of identifying biomarkers can be employed. If the target(s) of the compound is/are known, it is possible to build a model based on the gene expression of the known target(s). One example is the drug sunitinib (SU11248), for which eight targets are known. Sunitinib inhibits at least eight receptor protein-tyrosine kinases including vascular endothelial growth factor receptors 1-3 (VEGFR1-VEGFR3), platelet-derived growth factor receptors (PDGFRA and PDGFRB), stem cell factor receptor (Kit), Flt-3, and colony-stimulating factor-1 receptor (CSF-1R). U.S. Patent Application Publication 2006/0040292 mentions prediction of response measuring just two targets, PDGFRA and KIT. Using the sum of the gene expression of four targets it is possible to predict with more reliability the response to sunitinib. As an example, the predicted sunitinib sensitivity of cell lines HT29, U118, 786, and H226 is 0.24, 2.3, 0.14 and 0.60, respectively, based on the sum of the four targets PDGFRB, KDR, KIT and FLT3. This correlates well with the measured response in mouse xenografts of these cells (correlation coefficient 0.86) as well as with the measured anti-angiogenetic effect measured in mouse xenografts (Potapova et al. Contribution of individual targets to the antitumor efficacy of the multitargeted receptor tyrosine kinase inhibitor SU11248 (Mol. Cancer. Ther. 5(5):1280-9, 2006). This is better than a model based only on two targets PDGFRA and KIT (correlation coefficient 0.56).

[0091] This four-gene predictor of sunitinib response can be applied to a large number of tumor samples from patients with different tumors from which gene expression analysis has been performed in order to get an idea of the range of sensitivities within each cancer type as well as which cancer types are most susceptible to treatment with sunitinib. FIG. 11 shows just a small fraction of the cancer samples available from www.intgen.org/expo.html. The comparison is based on normalizing the samples in such a way (e.g., logit normalization) that different cancer types become comparable. Sunitinib is currently approved by the FDA for renal cancer and gastrointestinal cancer. Both kidney and colon show a good response in this plot.

[0092] Any other drug response predictor based on gene expression can be tested in the same manner as shown in FIG. 11.

[0093] The approach of identifying biomarkers based on known targets can also be applied to RNA antagonists such as SPC2996 targeted against Bcl-2. A response predictor can be built based on measuring the gene expression of Bcl-2 in samples from cancer patients. The same approach can be used for the targets of all mRNA antagonists or inhibitors.

### Example 10

### Identifying Candidate Drugs for a Known Target

[0094] The methods of the invention described herein can also be used for identifying candidate drugs to a known target. Basically, the method of identifying biomarkers is run backwards in order to identify candidate drugs. If one starts with a known target, the expression of its corresponding gene is determined in the NCI 60 cell lines and correlated to the measured growth inhibition of all the thousands of drugs tested in the NCI 60 cell lines. This provides a list, ranked by correlation coefficient, of candidate drugs for the target. It is even possible to test new drugs and compare their correlation coefficient to the target gene expression to the correlation coefficients of the already tested drugs.

### Example 11

### Using MicroRNAs as Biomarkers of Drug Response

[0095] In recent years it has become clear that microRNAs (miRNA) play an important role in regulating the translation of mRNAs. As such, microRNAs may contain important information relevant for the prediction of drug sensitivity. This information may be complementary to the information contained in mRNA expression. Shown below is the correlation between predicted and measured chemosensitivity of the NCI 60 cell lines. The prediction is based either on mRNA measurements with DNA microarrays as described herein or predictions based on measurements of microRNA concentration (ArrayExpress accession number E-MEXP-1029) using a microRNA specific microarray (ArrayExpress accession number A-MEXP-620). Whenever more than one probe is used to determine the concentration of a given microRNA, the median correlation procedure is used for calculating correlation between microRNA concentration and −log(GI50).

| | miRNA | mRNA | Combined |
|---|---|---|---|
| cisplatin | 0.16 | 0.02 | 0.21 |
| PXD101 | 0.44 | 0.31 | 0.50 |
| vincristine | 0.06 | 0.11 | 0.26 |
| etoposide | 0.32 | 0.41 | 0.44 |
| adriamycine | 0.24 | 0.22 | 0.28 |

As the above table shows, the correlation (determined using leave-one-out cross-validation) is highest when using a combination (linear sum) of microRNA and mRNA predictions. These results suggest that a more accurate drug response predictor can be built using a combination of microRNA and mRNA. It is possible to measure both in the same experiment, as long as one takes into consideration that microRNAs in general do not have a polyA tail as mRNA does. Only slight modifications to the amplification and labeling methods used for mRNA may be needed to incorporate microRNAs into the analysis. Commercial kits for microRNA extraction, amplification, and labeling are available from suppliers (e.g., Ambion Inc.).

[0096] Tables 22A-76A list the microRNA probes that are useful for detection of sensitivity to individual drugs, as determined by their median correlation to −log(GI50) for the indicated drug.

### OTHER EMBODIMENTS

[0097] All publications and patent applications mentioned in this specification are herein incorporated by reference to the same extent as if each independent publication or patent application was specifically and individually indicated to be incorporated by reference. While the invention has been described in connection with specific embodiments thereof, it will be understood that it is capable of further modifications and this application is intended to cover any variations, uses, or adaptations of the invention following, in general, the principles of the invention and including such departures from the present disclosure that come within known or customary practice within the art to which the invention pertains and may be applied to the essential features hereinbefore set forth.

### Legend:

[0098] List_{—}2006: biomarkers identified in 2006 using the new U133A chip measurements
List_{—}2005: biomarkers listed in 2005 patent filing
HU6800: biomarkers obtained with old HU6800 chip measurements
List_Prior: matching biomakrers in prior art
List_Preferr: Preferred list of biomarkers
Correlation: The correlation of the biomarker to sensitivity to the compound

TABLE 1
Vincristine biomarkers

| | List_2006 | List_2005 | List_Prior | List_Preferr | Correlation |
|---|---|---|---|---|---|
| [1,] | UBB | | UBB | | 0.39 |
| [2,] | RPS4X | | | RPS4X | 0.34 |
| [3,] | S100A4 | | | S100A4 | 0.32 |
| [4,] | NDUFS6 | | | NDUFS6 | 0.31 |
| [5,] | B2M | | B2M | | 0.35 |
| [6,] | C14orf139 | | | C14orf139 | 0.3 |
| [7,] | MAN1A1 | | MAN1A1 | | 0.33 |
| [8,] | SLC25A5 | SLC25A5 | | SLC25A5 | 0.32 |
| [9,] | RPL10 | | | RPL10 | 0.38 |
| [10,] | RPL12 | | | RPL12 | 0.31 |
| [11,] | EIF5A | | | EIF5A | 0.31 |
| [12,] | RPL36A | RPL36A | | RPL36A | 0.3 |
| [13,] | SUI1 | | SUI1 | | 0.33 |
| [14,] | BLMH | | | BLMH | 0.32 |
| [15,] | CTBP1 | | | CTBP1 | 0.32 |
| [16,] | TBCA | | | TBCA | 0.3 |
| [17,] | MDH2 | | | MDH2 | 0.34 |
| [18,] | DXS9879E | | | DXS9879E | 0.35 |
| [19,] | | SFRS3 | | | |
| [20,] | | CCT5 | | | |
| [21,] | | RPL39 | | | |
| [22,] | | UBE2S | | | |
| [23,] | | EEF1A1 | | | |
| [24,] | | COX7B | | | |
| [25,] | | RPLP2 | | | |
| [26,] | | RPL24 | | | |
| [27,] | | RPS23 | | | |
| [28,] | | RPL18 | | | |
| [29,] | | NCL | | | |
| [30,] | | RPL9 | | | |
| [31,] | | RPL10A | | | |
| [32,] | | RPS10 | | | |
| [33,] | | EIF3S2 | | | |
| [34,] | | SHFM1 | | | |
| [35,] | | RPS28 | | | |
| [36,] | | REA | | | |
| [37,] | | GAPD | | | |
| [38,] | | HNRPA1 | | | |
| [39,] | | RPS11 | | | |
| [40,] | | LDHB | | | |
| [41,] | | RPL3 | | | |
| [42,] | | RPL11 | | | |
| [43,] | | MRPL12 | | | |
| [44,] | | RPL18A | | | |
| [45,] | | RPS7 | | | |

TABLE 2
Cisplatin biomarkers

| | | | | | Cor- |
|---|---|---|---|---|---|
| | List_2006 | List_2005 | List_Prior | List_Preferr | relation |
| [1,] | C1QR1 | | | C1QR1 | 0.3 |
| [2,] | HCLS1 | HCLS1 | HCLS1 | | 0.33 |
| [3,] | CD53 | | CD53 | | 0.35 |
| [4,] | SLA | | | SLA | 0.37 |
| [5,] | PTPN7 | PTPN7 | | PTPN7 | 0.31 |
| [6,] | PTPRCAP | | PTPRCAP | | 0.32 |
| [7,] | ZNFN1A1 | | | ZNFN1A1 | 0.33 |
| [8,] | CENTB1 | | | CENTB1 | 0.37 |
| [9,] | PTPRC | | PTPRC | | 0.36 |
| [10,] | IFI16 | IFI16 | | IFI16 | 0.31 |
| [11,] | ARHGEF6 | | | ARHGEF6 | 0.35 |
| [12,] | SEC31L2 | | | SEC31L2 | 0.32 |
| [13,] | CD3Z | | | CD3Z | 0.32 |
| [14,] | GZMB | | | GZMB | 0.3 |
| [15,] | CD3D | | | CD3D | 0.34 |
| [16,] | MAP4K1 | | | MAP4K1 | 0.32 |
| [17,] | GPR65 | | | GPR65 | 0.39 |
| [18,] | PRF1 | | | PRF1 | 0.31 |
| [19,] | ARHGAP15 | | | ARHGAP15 | 0.35 |
| [20,] | TM6SF1 | | | TM6SF1 | 0.41 |
| [21,] | TCF4 | | | TCF4 | 0.4 |
| [22,] | | GAPD | | | |
| [23,] | | ARHGDIB | | | |
| [24,] | | RPS27 | | | |
| [25,] | | C5orf13 | | | |
| [26,] | | LDHB | | | |
| [27,] | | SNRPF | | | |
| [28,] | | B2M | | | |
| [29,] | | FTL | | | |
| [30,] | | NCL | | | |
| [31,] | | MSN | | | |
| [32,] | | XPO1 | | | |

TABLE 3
Azaguanine biomarkers

| | List_2006 | List_2005 | List_Prior | List_Preferr | Correlation |
|---|---|---|---|---|---|
| [1,] | MSN | MSN | MSN | | 0.36 |
| [2,] | SPARC | SPARC | SPARC | | 0.48 |
| [3,] | VIM | VIM | VIM | | 0.47 |
| [4,] | SRM | SRM | | SRM | 0.32 |
| [5,] | SCARB1 | | | SCARB1 | 0.4 |
| [6,] | SIAT1 | | | SIAT1 | 0.31 |
| [7,] | CUGBP2 | | | CUGBP2 | 0.37 |
| [8,] | GAS7 | | GAS7 | | 0.34 |
| [9,] | ICAM1 | | | ICAM1 | 0.43 |
| [10,] | WASPIP | | | WASPIP | 0.44 |
| [11,] | ITM2A | | | ITM2A | 0.31 |
| [12,] | PALM2-AKAP2 | | | PALM2-AKAP2 | 0.31 |
| [13,] | ANPEP | | ANPEP | | 0.33 |
| [14,] | PTPNS1 | | | PTPNS1 | 0.39 |
| [15,] | MPP1 | | | MPP1 | 0.32 |
| [16,] | LNK | | | LNK | 0.43 |
| [17,] | FCGR2A | | | FCGR2A | 0.3 |
| [18,] | EMP3 | EMP3 | EMP3 | | 0.33 |
| [19,] | RUNX3 | | | RUNX3 | 0.43 |
| [20,] | EVI2A | | | EVI2A | 0.4 |
| [21,] | BTN3A3 | | | BTN3A3 | 0.4 |
| [22,] | LCP2 | | | LCP2 | 0.34 |
| [23,] | BCHE | | | BCHE | 0.35 |
| [24,] | LY96 | | | LY96 | 0.47 |
| [25,] | LCP1 | | | LCP1 | 0.42 |
| [26,] | IFI16 | | | IFI16 | 0.33 |
| [27,] | MCAM | MCAM | | MCAM | 0.37 |
| [28,] | MEF2C | | | MEF2C | 0.41 |
| [29,] | SLC1A4 | | | SLC1A4 | 0.49 |
| [30,] | BTN3A2 | | BTN3A2 | | 0.43 |
| [31,] | FYN | | | FYN | 0.31 |
| [32,] | FN1 | FN1 | FN1 | | 0.33 |
| [33,] | C1orf38 | | | C1orf38 | 0.37 |
| [34,] | CHS1 | | | CHS1 | 0.33 |
| [35,] | CAPN3 | | CAPN3 | | 0.5 |
| [36,] | FCGR2C | | | FCGR2C | 0.34 |
| [37,] | TNIK | | | TNIK | 0.35 |
| [38,] | AMPD2 | | | AMPD2 | 0.3 |
| [39,] | SEPT6 | | | SEPT6 | 0.41 |
| [40,] | RAFTLIN | | | RAFTLIN | 0.39 |
| [41,] | SLC43A3 | | | SLC43A3 | 0.52 |
| [42,] | RAC2 | | | RAC2 | 0.33 |
| [43,] | LPXN | | | LPXN | 0.54 |
| [44,] | CKIP-1 | | | CKIP-1 | 0.33 |
| [45,] | FLJ10539 | | | FLJ10539 | 0.33 |
| [46,] | FLJ35036 | | | FLJ35036 | 0.36 |
| [47,] | DOCK10 | | | DOCK10 | 0.3 |
| [48,] | TRPV2 | | | TRPV2 | 0.31 |
| [49,] | IFRG28 | | | IFRG28 | 0.3 |
| [50,] | LEF1 | | | LEF1 | 0.31 |
| [51,] | ADAMTS1 | | | ADAMTS1 | 0.36 |
| [52,] | | PRPS1 | | | |
| [53,] | | DDOST | | | |
| [54,] | | B2M | | | |
| [55,] | | LGALS1 | | | |
| [56,] | | CBFB | | | |
| [57,] | | SNRPB2 | | | |
| [58,] | | EIF2S2 | | | |
| [59,] | | HPRT1 | | | |
| [60,] | | FKBP1A | | | |
| [61,] | | GYPC | | | |
| [62,] | | UROD | | | |
| [63,] | | HNRPA1 | | | |
| [64,] | | SND1 | | | |
| [65,] | | COPA | | | |
| [66,] | | MAPRE1 | | | |
| [67,] | | EIF3S2 | | | |
| [68,] | | ATP1B3 | | | |
| [69,] | | ECM1 | | | |
| [70,] | | ATOX1 | | | |
| [71,] | | NARS | | | |
| [72,] | | PGK1 | | | |
| [73,] | | OK/SW-cl.56 | | | |
| [74,] | | EEF1A1 | | | |
| [75,] | | GNAI2 | | | |
| [76,] | | RPL7 | | | |
| [77,] | | PSMB9 | | | |
| [78,] | | GPNMB | | | |
| [79,] | | PPP1R11 | | | |
| [80,] | | MIA | | | |
| [81,] | | RAB7 | | | |
| [82,] | | SMS | | | |

TABLE 4
Etoposide biomarkers

| | List_2006 | List_2005 | List_Prior | List_Preferr | Correlation |
|---|---|---|---|---|---|
| [1,] | CD99 | CD99 | | CD99 | 0.3 |
| [2,] | INSIG1 | | | INSIG1 | 0.35 |
| [3,] | LAPTM5 | | LAPTM5 | | 0.32 |
| [4,] | PRG1 | | | PRG1 | 0.34 |
| [5,] | MUF1 | | | MUF1 | 0.35 |
| [6,] | HCLS1 | | HCLS1 | | 0.33 |
| [7,] | CD53 | | CD53 | | 0.32 |
| [8,] | SLA | | | SLA | 0.37 |
| [9,] | SSBP2 | | | SSBP2 | 0.37 |
| [10,] | GNB5 | | | GNB5 | 0.35 |
| [11,] | MFNG | | | MFNG | 0.33 |
| [12,] | GMFG | | GMFG | | 0.32 |
| [13,] | PSMB9 | | | PSMB9 | 0.31 |
| [14,] | EVI2A | | | EVI2A | 0.41 |
| [15,] | PTPN7 | | | PTPN7 | 0.3 |
| [16,] | PTGER4 | | | PTGER4 | 0.3 |
| [17,] | CXorf9 | | | CXorf9 | 0.3 |
| [18,] | PTPRCAP | | PTPRCAP | | 0.3 |
| [19,] | ZNFN1A1 | | | ZNFN1A1 | 0.35 |
| [20,] | CENTB1 | | | CENTB1 | 0.3 |
| [21,] | PTPRC | | PTPRC | | 0.31 |
| [22,] | NAP1L1 | | | NAP1L1 | 0.31 |
| [23,] | HLA-DRA | | | HLA-DRA | 0.34 |
| [24,] | IFI16 | | | IFI16 | 0.38 |
| [25,] | CORO1A | | CORO1A | | 0.3 |
| [26,] | ARHGEF6 | | | ARHGEF6 | 0.33 |
| [27,] | PSCDBP | | | PSCDBP | 0.4 |
| [28,] | SELPLG | | | SELPLG | 0.35 |
| [29,] | LAT | | | LAT | 0.3 |
| [30,] | SEC31L2 | | | SEC31L2 | 0.42 |
| [31,] | CD3Z | | | CD3Z | 0.36 |
| [32,] | SH2D1A | | | SH2D1A | 0.33 |
| [33,] | GZMB | | | GZMB | 0.34 |
| [34,] | SCN3A | | | SCN3A | 0.3 |
| [35,] | ITK | | ITK | | 0.35 |
| [36,] | RAFTLIN | | | RAFTLIN | 0.39 |
| [37,] | DOCK2 | | | DOCK2 | 0.33 |
| [38,] | CD3D | | | CD3D | 0.31 |
| [39,] | RAC2 | | | RAC2 | 0.34 |
| [40,] | ZAP70 | | | ZAP70 | 0.35 |
| [41,] | GPR65 | | | GPR65 | 0.35 |
| [42,] | PRF1 | | | PRF1 | 0.32 |
| [43,] | ARHGAP15 | | | ARHGAP15 | 0.32 |
| [44,] | NOTCH1 | | | NOTCH1 | 0.31 |
| [45,] | UBASH3A | | | UBASH3A | 0.32 |
| [46,] | | B2M | | | |
| [47,] | | MYC | | | |
| [48,] | | RPS24 | | | |
| [49,] | | PPIF | | | |
| [50,] | | PBEF1 | | | |
| [51,] | | ANP32B | | | |

TABLE 5
Adriamycin biomarkers

| | | | | | Cor- |
|---|---|---|---|---|---|
| | List_2006 | List_2005 | List_Prior | List_Preferr | relation |
| [1,] | CD99 | CD99 | | CD99 | 0.41 |
| [2,] | LAPTM5 | | LAPTM5 | | 0.39 |
| [3,] | ALDOC | | | ALDOC | 0.31 |
| [4,] | HCLS1 | | HCLS1 | | 0.32 |
| [5,] | CD53 | | CD53 | | 0.31 |
| [6,] | SLA | | | SLA | 0.35 |
| [7,] | SSBP2 | | | SSBP2 | 0.34 |
| [8,] | IL2RG | | | IL2RG | 0.38 |
| [9,] | GMFG | | GMFG | | 0.32 |
| [10,] | CXorf9 | | | CXorf9 | 0.32 |
| [11,] | RHOH | | | RHOH | 0.31 |
| [12,] | PTPRCAP | | PTPRCAP | | 0.32 |
| [13,] | ZNFN1A1 | | | ZNFN1A1 | 0.43 |
| [14,] | CENTB1 | | | CENTB1 | 0.36 |
| [15,] | TCF7 | | TCF7 | | 0.32 |
| [16,] | CD1C | | | CD1C | 0.3 |
| [17,] | MAP4K1 | | | MAP4K1 | 0.35 |
| [18,] | CD1B | | CD1B | | 0.39 |
| [19,] | CD3G | | | CD3G | 0.31 |
| [20,] | PTPRC | | PTPRC | | 0.38 |
| [21,] | CCR9 | | | CCR9 | 0.34 |
| [22,] | CORO1A | | CORO1A | | 0.38 |
| [23,] | CXCR4 | | | CXCR4 | 0.3 |
| [24,] | ARHGEF6 | | | ARHGEF6 | 0.31 |
| [25,] | HEM1 | | HEM1 | | 0.32 |
| [26,] | SELPLG | | | SELPLG | 0.31 |
| [27,] | LAT | | | LAT | 0.31 |
| [28,] | SEC31L2 | | | SEC31L2 | 0.33 |
| [29,] | CD3Z | | | CD3Z | 0.37 |
| [30,] | SH2D1A | | | SH2D1A | 0.37 |
| [31,] | CD1A | | | CD1A | 0.4 |
| [32,] | LAIR1 | | | LAIR1 | 0.39 |
| [33,] | ITK | | ITK | | 0.3 |
| [34,] | TRB@ | | | TRB@ | 0.34 |
| [35,] | CD3D | | | CD3D | 0.33 |
| [36,] | WBSCR20C | | | WBSCR20C | 0.34 |
| [37,] | ZAP70 | | | ZAP70 | 0.33 |
| [38,] | IFI44 | | | IFI44 | 0.32 |
| [39,] | GPR65 | | | GPR65 | 0.31 |
| [40,] | AIF1 | | | AIF1 | 0.3 |
| [41,] | ARHGAP15 | | | ARHGAP15 | 0.37 |
| [42,] | NARF | | | NARF | 0.3 |
| [43,] | PACAP | | | PACAP | 0.32 |
| [44,] | | KIAA0220 | | | |
| [45,] | | B2M | | | |
| [46,] | | TOP2A | | | |
| [47,] | | SNRPE | | | |
| [48,] | | RPS27 | | | |
| [49,] | | HNRPA1 | | | |
| [50,] | | CBX3 | | | |
| [51,] | | ANP32B | | | |
| [52,] | | DDX5 | | | |
| [53,] | | PPIA | | | |
| [54,] | | SNRPF | | | |
| [55,] | | USP7 | | | |

TABLE 6
Aclarubicin biomarkers

| | List_2006 | List_2005 | List_Prior | List_Preferr | Correlation |
|---|---|---|---|---|---|
| [1,] | RPL12 | | | RPL12 | 0.3 |
| [2,] | RPL32 | | RPL32 | | 0.37 |
| [3,] | RPLP2 | RPLP2 | | RPLP2 | 0.37 |
| [4,] | MYB | MYB | | MYB | 0.31 |
| [5,] | ZNFN1A1 | | | ZNFN1A1 | 0.34 |
| [6,] | SCAP1 | | | SCAP1 | 0.33 |
| [7,] | STAT4 | | | STAT4 | 0.31 |
| [8,] | SP140 | | | SP140 | 0.4 |
| [9,] | AMPD3 | | | AMPD3 | 0.3 |
| [10,] | TNFAIP8 | | | TNFAIP8 | 0.4 |
| [11,] | DDX18 | | | DDX18 | 0.31 |
| [12,] | TAF5 | | | TAF5 | 0.3 |
| [13,] | FBL | | FBL | | 0.41 |
| [14,] | RPS2 | | | RPS2 | 0.34 |
| [15,] | PTPRC | | PTPRC | | 0.37 |
| [16,] | DOCK2 | | | DOCK2 | 0.32 |
| [17,] | GPR65 | | | GPR65 | 0.35 |
| [18,] | HOXA9 | | | HOXA9 | 0.33 |
| [19,] | FLJ12270 | | | FLJ12270 | 0.31 |
| [20,] | HNRPD | | | HNRPD | 0.4 |
| [21,] | | LAMR1 | | | |
| [22,] | | RPS25 | | | |
| [23,] | | EIF5A | | | |
| [24,] | | TUFM | | | |
| [25,] | | HNRPA1 | | | |
| [26,] | | RPS9 | | | |
| [27,] | | ANP32B | | | |
| [28,] | | EIF4B | | | |
| [29,] | | HMGB2 | | | |
| [30,] | | RPS15A | | | |
| [31,] | | RPS7 | | | |

TABLE 7
Mitoxantrone biomarkers

| | | | | | Cor- |
|---|---|---|---|---|---|
| | List_2006 | List_2005 | List_Prior | List_Preferr | relation |
| [1,] | PGAM1 | | | PGAM1 | 0.32 |
| [2,] | DPYSL3 | | | DPYSL3 | 0.36 |
| [3,] | INSIG1 | | | INSIG1 | 0.32 |
| [4,] | GJA1 | | | GJA1 | 0.31 |
| [5,] | BNIP3 | | | BNIP3 | 0.31 |
| [6,] | PRG1 | PRG1 | | PRG1 | 0.39 |
| [7,] | G6PD | G6PD | | G6PD | 0.34 |
| [8,] | BASP1 | | BASP1 | | 0.31 |
| [9,] | PLOD2 | | | PLOD2 | 0.34 |
| [10,] | LOXL2 | | | LOXL2 | 0.31 |
| [11,] | SSBP2 | | | SSBP2 | 0.36 |
| [12,] | C1orf29 | | | C1orf29 | 0.35 |
| [13,] | TOX | | | TOX | 0.35 |
| [14,] | STC1 | | | STC1 | 0.39 |
| [15,] | TNFRSF1A | TNFRSF1A | | TNFRSF1A | 0.34 |
| [16,] | NCOR2 | NCOR2 | | NCOR2 | 0.3 |
| [17,] | NAP1L1 | NAP1L1 | | NAP1L1 | 0.32 |
| [18,] | LOC94105 | | | LOC94105 | 0.34 |
| [19,] | COL6A2 | | COL6A2 | | 0.3 |
| [20,] | ARHGEF6 | ARHGEF6 | | ARHGEF6 | 0.34 |
| [21,] | GATA3 | | | GATA3 | 0.35 |
| [22,] | TFPI | | | TFPI | 0.31 |
| [23,] | LAT | | | LAT | 0.31 |
| [24,] | CD3Z | | | CD3Z | 0.37 |
| [25,] | AF1Q | | | AF1Q | 0.33 |
| [26,] | MAP1B | MAP1B | | MAP1B | 0.34 |
| [27,] | PTPRC | | PTPRC | | 0.31 |
| [28,] | PRKCA | | PRKCA | | 0.35 |
| [29,] | TRIM22 | | | TRIM22 | 0.3 |
| [30,] | CD3D | | | CD3D | 0.31 |
| [31,] | BCAT1 | | | BCAT1 | 0.32 |
| [32,] | IFI44 | | | IFI44 | 0.33 |
| [33,] | CCL2 | | CCL2 | | 0.37 |
| [34,] | RAB31 | | RAB31 | | 0.31 |
| [35,] | CUTC | | | CUTC | 0.33 |
| [36,] | NAP1L2 | | | NAP1L2 | 0.33 |
| [37,] | NME7 | | | NME7 | 0.35 |
| [38,] | FLJ21159 | | | FLJ21159 | 0.33 |
| [39,] | COL5A2 | | | COL5A2 | 0.38 |
| [40,] | | B2M | | | |
| [41,] | | OK/SW-cl.56 | | | |
| [42,] | | TOP2A | | | |
| [43,] | | ELA2B | | | |
| [44,] | | PTMA | | | |
| [45,] | | LMNB1 | | | |
| [46,] | | HNRPA1 | | | |
| [47,] | | RPL9 | | | |
| [48,] | | C5orf13 | | | |
| [49,] | | ANP32B | | | |
| [50,] | | TUBA3 | | | |
| [51,] | | HMGN2 | | | |
| [52,] | | PRPS1 | | | |
| [53,] | | DDX5 | | | |
| [54,] | | PPIA | | | |
| [55,] | | PSMB9 | | | |
| [56,] | | SNRPF | | | |

TABLE 8
Mitomycin biomarkers

| | List_2006 | HU6800 | List_Prior | List_Preferr | Correlation |
|---|---|---|---|---|---|
| [1,] | STC1 | | | STC1 | 0.34 |
| [2,] | GPR65 | | | GPR65 | 0.32 |
| [3,] | DOCK10 | | | DOCK10 | 0.35 |
| [4,] | COL5A2 | | | COL5A2 | 0.33 |
| [5,] | FAM46A | | | FAM46A | 0.36 |
| [6,] | LOC54103 | | | LOC54103 | 0.39 |

TABLE 9
Paclitaxel (Taxol) biomarkers

| | List_2006 | HU6800 | List_Prior | List_Preferr | Correlation |
|---|---|---|---|---|---|
| [1,] | RPL10 | | | RPL10 | 0.31 |
| [2,] | RPS4X | | | RPS4X | 0.31 |
| [3,] | NUDC | | | NUDC | 0.3 |
| [4,] | RALY | | RALY | | 0.31 |
| [5,] | DKC1 | | | DKC1 | 0.3 |
| [6,] | DKFZP564C186 | | | DKFZP564C186 | 0.32 |
| [7,] | PRP19 | | | PRP19 | 0.31 |
| [8,] | RAB9P40 | | | RAB9P40 | 0.33 |
| [9,] | HSA9761 | | | HSA9761 | 0.37 |
| [10,] | GMDS | | | GMDS | 0.3 |
| [11,] | CEP1 | | | CEP1 | 0.3 |
| [12,] | IL13RA2 | | | IL13RA2 | 0.34 |
| [13,] | MAGEB2 | | | MAGEB2 | 0.41 |
| [14,] | HMGN2 | | | HMGN2 | 0.35 |
| [15,] | ALMS1 | | | ALMS1 | 0.3 |
| [16,] | GPR65 | | | GPR65 | 0.31 |
| [17,] | FLJ10774 | | | FLJ10774 | 0.31 |
| [18,] | NOL8 | | | NOL8 | 0.31 |
| [19,] | DAZAP1 | | | DAZAP1 | 0.32 |
| [20,] | SLC25A15 | | | SLC25A15 | 0.31 |
| [21,] | PAF53 | | | PAF53 | 0.36 |
| [22,] | DXS9879E | | | DXS9879E | 0.31 |
| [23,] | PITPNC1 | | | PITPNC1 | 0.33 |
| [24,] | SPANXC | | | SPANXC | 0.3 |
| [25,] | KIAA1393 | | | KIAA1393 | 0.33 |

TABLE 10
Gemcitabine (Gemzar) biomarkers

| | List_2006 | HU6800 | List_Prior | List_Preferr | Correlation |
|---|---|---|---|---|---|
| [1,] | PFN1 | | | PFN1 | 0.37 |
| [2,] | PGAM1 | | | PGAM1 | 0.35 |
| [3,] | K-ALPHA-1 | | | K-ALPHA-1 | 0.34 |
| [4,] | CSDA | | | CSDA | 0.31 |
| [5,] | UCHL1 | | | UCHL1 | 0.36 |
| [6,] | PWP1 | | | PWP1 | 0.37 |
| [7,] | PALM2- | | | PALM2- | 0.31 |
| | AKAP2 | | | AKAP2 | |
| [8,] | TNFRSF1A | | | TNFRSF1A | 0.31 |
| [9,] | ATP5G2 | | | ATP5G2 | 0.36 |
| [10,] | AF1Q | | | AF1Q | 0.31 |
| [11,] | NME4 | | | NME4 | 0.31 |
| [12,] | FHOD1 | | | FHOD1 | 0.32 |

TABLE 11
Taxotere (docetaxel) biomarkers

| | List_2006 | List_2005 | List_Prior | List_Preferr | Correlation |
|---|---|---|---|---|---|
| [1,] | ANP32B | | | ANP32B | 0.45 |
| [2,] | GTF3A | | | GTF3A | 0.31 |
| [3,] | RRM2 | | | RRM2 | 0.31 |
| [4,] | TRIM14 | | | TRIM14 | 0.31 |
| [5,] | SKP2 | | | SKP2 | 0.33 |
| [6,] | TRIP13 | | | TRIP13 | 0.36 |
| [7,] | RFC3 | | | RFC3 | 0.45 |
| [8,] | CASP7 | | | CASP7 | 0.32 |
| [9,] | TXN | | | TXN | 0.36 |
| [10,] | MCM5 | | | MCM5 | 0.34 |
| [11,] | PTGES2 | | | PTGES2 | 0.39 |
| [12,] | OBFC1 | | | OBFC1 | 0.37 |
| [13,] | EPB41L4B | | | EPB41L4B | 0.32 |
| [14,] | CALML4 | | | CALML4 | 0.31 |

TABLE 12
Dexamethasone biomarkers

| | | | | | Cor- |
|---|---|---|---|---|---|
| | List_2006 | HU6800 | List_Prior | List_Preferr | relation |
| [1,] | IFITM2 | | | IFITM2 | 0.38 |
| [2,] | UBE2L6 | | | UBE2L6 | 0.32 |
| [3,] | LAPTM5 | LAPTM5 | LAPTM5 | | 0.36 |
| [4,] | USP4 | | | USP4 | 0.33 |
| [5,] | ITM2A | | | ITM2A | 0.38 |
| [6,] | ITGB2 | | ITGB2 | | 0.42 |
| [7,] | ANPEP | | ANPEP | | 0.31 |
| [8,] | CD53 | | CD53 | | 0.34 |
| [9,] | IL2RG | IL2RG | | IL2RG | 0.36 |
| [10,] | CD37 | | CD37 | | 0.34 |
| [11,] | GPRASP1 | | | GPRASP1 | 0.36 |
| [12,] | PTPN7 | | | PTPN7 | 0.31 |
| [13,] | CXorf9 | | | CXorf9 | 0.36 |
| [14,] | RHOH | RHOH | | RHOH | 0.33 |
| [15,] | GIT2 | | | GIT2 | 0.31 |
| [16,] | ADORA2A | | ADORA2A | | 0.31 |
| [17,] | ZNFN1A1 | | | ZNFN1A1 | 0.35 |
| [18,] | GNA15 | GNA15 | GNA15 | | 0.33 |
| [19,] | CEP1 | | | CEP1 | 0.31 |
| [20,] | TNFRSF7 | | | TNFRSF7 | 0.46 |
| [21,] | MAP4K1 | | | MAP4K1 | 0.3 |
| [22,] | CCR7 | | | CCR7 | 0.33 |
| [23,] | CD3G | | | CD3G | 0.35 |
| [24,] | PTPRC | | PTPRC | | 0.41 |
| [25,] | ATP2A3 | ATP2A3 | | ATP2A3 | 0.4 |
| [26,] | UCP2 | | | UCP2 | 0.3 |
| [27,] | CORO1A | CORO1A | CORO1A | | 0.39 |
| [28,] | GATA3 | GATA3 | | GATA3 | 0.37 |
| [29,] | CDKN2A | | | CDKN2A | 0.32 |
| [30,] | HEM1 | | HEM1 | | 0.3 |
| [31,] | TARP | | | TARP | 0.3 |
| [32,] | LAIR1 | | | LAIR1 | 0.34 |
| [33,] | SH2D1A | | | SH2D1A | 0.34 |
| [34,] | FLII | FLII | FLII | | 0.33 |
| [35,] | SEPT6 | | | SEPT6 | 0.34 |
| [36,] | HA-1 | | | HA-1 | 0.34 |
| [37,] | CREB3L1 | | CREB3L1 | | 0.31 |
| [38,] | ERCC2 | | | ERCC2 | 0.65 |
| [39,] | CD3D | CD3D | | CD3D | 0.32 |
| [40,] | LST1 | | | LST1 | 0.39 |
| [41,] | AIF1 | | | AIF1 | 0.35 |
| [42,] | ADA | | | ADA | 0.33 |
| [43,] | DATF1 | | | DATF1 | 0.41 |
| [44,] | ARHGAP15 | | | ARHGAP15 | 0.3 |
| [45,] | PLAC8 | | | PLAC8 | 0.31 |
| [46,] | CECR1 | | | CECR1 | 0.31 |
| [47,] | LOC81558 | | | LOC81558 | 0.33 |
| [48,] | EHD2 | | | EHD2 | 0.37 |

TABLE 13
Ara-C (Cytarabine hydrochloride) biomarkers

| | List_2006 | HU6800 | List_Prior | List_Preferr | Correlation |
|---|---|---|---|---|---|
| [1,] | ITM2A | | | ITM2A | 0.32 |
| [2,] | RHOH | | | RHOH | 0.31 |
| [3,] | PRIM1 | | | PRIM1 | 0.3 |
| [4,] | CENTB1 | | | CENTB1 | 0.31 |
| [5,] | GNA15 | | GNA15 | | 0.32 |
| [6,] | NAP1L1 | NAP1L1 | | NAP1L1 | 0.31 |
| [7,] | ATP5G2 | | | ATP5G2 | 0.31 |
| [8,] | GATA3 | | | GATA3 | 0.33 |
| [9,] | PRKCQ | | | PRKCQ | 0.32 |
| [10,] | SH2D1A | | | SH2D1A | 0.3 |
| [11,] | SEPT6 | | | SEPT6 | 0.42 |
| [12,] | PTPRC | | PTPRC | | 0.35 |
| [13,] | NME4 | | | NME4 | 0.33 |
| [14,] | RPL13 | | RPL13 | | 0.3 |
| [15,] | CD3D | | | CD3D | 0.31 |
| [16,] | CD1E | | | CD1E | 0.32 |
| [17,] | ADA | ADA | | ADA | 0.34 |
| [18,] | FHOD1 | | | FHOD1 | 0.31 |

TABLE 14
Methylprednisolone biomarkers

| | | | | | Cor- |
|---|---|---|---|---|---|
| | List_2006 | HU6800 | List_Prior | List_Preferr | relation |
| [1,] | CD99 | CD99 | | CD99 | 0.31 |
| [2,] | SRRM1 | | SRRM1 | | 0.31 |
| [3,] | ARHGDIB | ARHGDIB | | ARHGDIB | 0.31 |
| [4,] | LAPTM5 | LAPTM5 | LAPTM5 | | 0.37 |
| [5,] | VWF | | | VWF | 0.45 |
| [6,] | ITM2A | | | ITM2A | 0.35 |
| [7,] | ITGB2 | ITGB2 | ITGB2 | | 0.43 |
| [8,] | LGALS9 | LGALS9 | | LGALS9 | 0.43 |
| [9,] | INPP5D | | | INPP5D | 0.34 |
| [10,] | SATB1 | SATB1 | | SATB1 | 0.32 |
| [11,] | CD53 | CD53 | CD53 | | 0.33 |
| [12,] | TFDP2 | TFDP2 | | TFDP2 | 0.4 |
| [13,] | SLA | SLA | | SLA | 0.31 |
| [14,] | IL2RG | IL2RG | | IL2RG | 0.3 |
| [15,] | MFNG | | | MFNG | 0.3 |
| [16,] | CD37 | | CD37 | | 0.37 |
| [17,] | GMFG | | GMFG | | 0.4 |
| [18,] | SELL | | | SELL | 0.33 |
| [19,] | CDW52 | CDW52 | | CDW52 | 0.33 |
| [20,] | LRMP | | | LRMP | 0.32 |
| [21,] | ICAM2 | | | ICAM2 | 0.38 |
| [22,] | RIMS3 | | | RIMS3 | 0.36 |
| [23,] | PTPN7 | PTPN7 | | PTPN7 | 0.39 |
| [24,] | ARHGAP25 | | | ARHGAP25 | 0.37 |
| [25,] | LCK | LCK | | LCK | 0.3 |
| [26,] | CXorf9 | | | CXorf9 | 0.3 |
| [27,] | RHOH | RHOH | | RHOH | 0.51 |
| [28,] | PTPRCAP | PTPRCAP | PTPRCAP | | 0.5 |
| [29,] | GIT2 | | | GIT2 | 0.33 |
| [30,] | ZNFN1A1 | ZNFN1A1 | | ZNFN1A1 | 0.53 |
| [31,] | CENTB1 | CENTB1 | | CENTB1 | 0.36 |
| [32,] | LCP2 | | | LCP2 | 0.34 |
| [33,] | SPI1 | | | SPI1 | 0.3 |
| [34,] | GNA15 | GNA15 | GNA15 | | 0.39 |
| [35,] | GZMA | | | GZMA | 0.31 |
| [36,] | CEP1 | | | CEP1 | 0.37 |
| [37,] | BLM | | BLM | | 0.33 |
| [38,] | CD8A | | | CD8A | 0.38 |
| [39,] | SCAP1 | | | SCAP1 | 0.32 |
| [40,] | CD2 | | | CD2 | 0.48 |
| [41,] | CD1C | CD1C | | CD1C | 0.37 |
| [42,] | TNFRSF7 | | | TNFRSF7 | 0.31 |
| [43,] | VAV1 | | | VAV1 | 0.41 |
| [44,] | MAP4K1 | MAP4K1 | | MAP4K1 | 0.36 |
| [45,] | CCR7 | | | CCR7 | 0.37 |
| [46,] | C6orf32 | | | C6orf32 | 0.38 |
| [47,] | ALOX15B | | | ALOX15B | 0.43 |
| [48,] | BRDT | | | BRDT | 0.33 |
| [49,] | CD3G | CD3G | | CD3G | 0.51 |
| [50,] | PTPRC | | PTPRC | | 0.37 |
| [51,] | LTB | | | LTB | 0.32 |
| [52,] | ATP2A3 | ATP2A3 | | ATP2A3 | 0.3 |
| [53,] | NVL | | | NVL | 0.31 |
| [54,] | RASGRP2 | | | RASGRP2 | 0.35 |
| [55,] | LCP1 | LCP1 | | LCP1 | 0.34 |
| [56,] | CORO1A | CORO1A | CORO1A | | 0.41 |
| [57,] | CXCR4 | CXCR4 | | CXCR4 | 0.3 |
| [58,] | PRKD2 | | | PRKD2 | 0.33 |
| [59,] | GATA3 | GATA3 | | GATA3 | 0.39 |
| [60,] | TRA@ | | | TRA@ | 0.4 |
| [61,] | PRKCB1 | PRKCB1 | PRKCB1 | | 0.35 |
| [62,] | HEM1 | | HEM1 | | 0.32 |
| [63,] | KIAA0922 | | | KIAA0922 | 0.36 |
| [64,] | TARP | | | TARP | 0.49 |
| [65,] | SEC31L2 | | | SEC31L2 | 0.32 |
| [66,] | PRKCQ | | | PRKCQ | 0.37 |
| [67,] | SH2D1A | | | SH2D1A | 0.33 |
| [68,] | CHRNA3 | | | CHRNA3 | 0.5 |
| [69,] | CD1A | | | CD1A | 0.44 |
| [70,] | LST1 | | | LST1 | 0.36 |
| [71,] | LAIR1 | | | LAIR1 | 0.47 |
| [72,] | CACNA1G | | | CACNA1G | 0.33 |
| [73,] | TRB@ | TRB@ | | TRB@ | 0.31 |
| [74,] | SEPT6 | SEPT6 | | SEPT6 | 0.33 |
| [75,] | HA-1 | | | HA-1 | 0.42 |
| [76,] | DOCK2 | | | DOCK2 | 0.32 |
| [77,] | CD3D | CD3D | | CD3D | 0.41 |
| [78,] | TRD@ | | | TRD@ | 0.38 |
| [79,] | T3JAM | | | T3JAM | 0.37 |
| [80,] | FNBP1 | | | FNBP1 | 0.37 |
| [81,] | CD6 | | | CD6 | 0.4 |
| [82,] | AIF1 | AIF1 | | AIF1 | 0.31 |
| [83,] | FOLH1 | | | FOLH1 | 0.45 |
| [84,] | CD1E | CD1E | | CD1E | 0.58 |
| [85,] | LY9 | | | LY9 | 0.39 |
| [86,] | UGT2B17 | | UGT2B17 | | 0.47 |
| [87,] | ADA | ADA | | ADA | 0.39 |
| [88,] | CDKL5 | | | CDKL5 | 0.44 |
| [89,] | TRIM | | | TRIM | 0.38 |
| [90,] | EVL | | | EVL | 0.39 |
| [91,] | DATF1 | | | DATF1 | 0.31 |
| [92,] | RGC32 | | | RGC32 | 0.51 |
| [93,] | PRKCH | | | PRKCH | 0.3 |
| [94,] | ARHGAP15 | | | ARHGAP15 | 0.34 |
| [95,] | NOTCH1 | | | NOTCH1 | 0.36 |
| [96,] | BIN2 | | | BIN2 | 0.31 |
| [97,] | SEMA4G | | | SEMA4G | 0.35 |
| [98,] | DPEP2 | | | DPEP2 | 0.33 |
| [99,] | CECR1 | | | CECR1 | 0.36 |
| [100,] | BCL11B | | | BCL11B | 0.33 |
| [101,] | STAG3 | | | STAG3 | 0.41 |
| [102,] | GALNT6 | | | GALNT6 | 0.32 |
| [103,] | UBASH3A | | | UBASH3A | 0.3 |
| [104,] | PHEMX | | | PHEMX | 0.38 |
| [105,] | FLJ13373 | | | FLJ13373 | 0.34 |
| [106,] | LEF1 | | | LEF1 | 0.49 |
| [107,] | IL21R | | | IL21R | 0.42 |
| [108,] | MGC17330 | | | MGC17330 | 0.33 |
| [109,] | AKAP13 | | | AKAP13 | 0.53 |
| [110,] | ZNF335 | | | ZNF335 | 0.3 |
| [111,] | GIMAP5 | | | GIMAP5 | 0.34 |

TABLE 15
Methotrexate biomarkers

| | List_2006 | HU6800 | List_Prior | List_Preferr | Correlation |
|---|---|---|---|---|---|
| [1,] | PRPF8 | | | PRPF8 | 0.34 |
| [2,] | RPL18 | | | RPL18 | 0.34 |
| [3,] | RNPS1 | | RNPS1 | | 0.36 |
| [4,] | RPL32 | | RPL32 | | 0.39 |
| [5,] | EEF1G | | EEF1G | | 0.34 |
| [6,] | GOT2 | | | GOT2 | 0.31 |
| [7,] | RPL13A | | | RPL13A | 0.31 |
| [8,] | PTMA | PTMA | PTMA | | 0.41 |
| [9,] | RPS15 | | | RPS15 | 0.39 |
| [10,] | RPLP2 | RPLP2 | | RPLP2 | 0.32 |
| [11,] | CSDA | | | CSDA | 0.39 |
| [12,] | KHDRBS1 | | | KHDRBS1 | 0.32 |
| [13,] | SNRPA | | | SNRPA | 0.31 |
| [14,] | IMPDH2 | IMPDH2 | | IMPDH2 | 0.39 |
| [15,] | RPS19 | | | RPS19 | 0.47 |
| [16,] | NUP88 | | | NUP88 | 0.36 |
| [17,] | ATP5D | | | ATP5D | 0.33 |
| [18,] | PCBP2 | | | PCBP2 | 0.32 |
| [19,] | ZNF593 | | | ZNF593 | 0.4 |
| [20,] | HSU79274 | | | HSU79274 | 0.32 |
| [21,] | PRIM1 | | | PRIM1 | 0.3 |
| [22,] | PFDN5 | | | PFDN5 | 0.33 |
| [23,] | OXA1L | | | OXA1L | 0.37 |
| [24,] | H3F3A | | | H3F3A | 0.42 |
| [25,] | ATIC | | | ATIC | 0.31 |
| [26,] | RPL13 | | RPL13 | | 0.36 |
| [27,] | CIAPIN1 | | | CIAPIN1 | 0.34 |
| [28,] | FBL | | FBL | | 0.33 |
| [29,] | RPS2 | RPS2 | | RPS2 | 0.32 |
| [30,] | PCCB | | | PCCB | 0.36 |
| [31,] | RBMX | | RBMX | | 0.33 |
| [32,] | SHMT2 | | | SHMT2 | 0.34 |
| [33,] | RPLP0 | | | RPLP0 | 0.35 |
| [34,] | HNRPA1 | HNRPA1 | | HNRPA1 | 0.35 |
| [35,] | STOML2 | | | STOML2 | 0.32 |
| [36,] | RPS9 | | RPS9 | | 0.36 |
| [37,] | SKB1 | | | SKB1 | 0.33 |
| [38,] | GLTSCR2 | | | GLTSCR2 | 0.37 |
| [39,] | CCNB1IP1 | | | CCNB1IP1 | 0.3 |
| [40,] | MRPS2 | | | MRPS2 | 0.33 |
| [41,] | FLJ20859 | | | FLJ20859 | 0.34 |
| [42,] | FLJ12270 | | | FLJ12270 | 0.3 |

TABLE 16
Bleomycin biomarkers

| | List_2006 | HU6800 | List_Prior | List_Preferr | Correlation |
|---|---|---|---|---|---|
| [1,] | MSN | | MSN | | 0.3 |
| [2,] | PFN1 | | | PFN1 | 0.45 |
| [3,] | HK1 | | | HK1 | 0.33 |
| [4,] | ACTR2 | | ACTR2 | | 0.31 |
| [5,] | MCL1 | | | MCL1 | 0.31 |
| [6,] | ZYX | | | ZYX | 0.32 |
| [7,] | RAP1B | | | RAP1B | 0.34 |
| [8,] | GNB2 | | | GNB2 | 0.32 |
| [9,] | EPAS1 | | | EPAS1 | 0.31 |
| [10,] | PGAM1 | | | PGAM1 | 0.42 |
| [11,] | CKAP4 | | | CKAP4 | 0.31 |
| [12,] | DUSP1 | | | DUSP1 | 0.4 |
| [13,] | MYL9 | | | MYL9 | 0.4 |
| [14,] | K-ALPHA-1 | | | K-ALPHA-1 | 0.37 |
| [15,] | LGALS1 | | | LGALS1 | 0.38 |
| [16,] | CSDA | CSDA | | CSDA | 0.3 |
| [17,] | AKR1B1 | | AKR1B1 | | 0.32 |
| [18,] | IFITM2 | IFITM2 | | IFITM2 | 0.36 |
| [19,] | ITGA5 | | | ITGA5 | 0.43 |
| [20,] | VIM | | VIM | | 0.39 |
| [21,] | DPYSL3 | | | DPYSL3 | 0.44 |
| [22,] | JUNB | | | JUNB | 0.32 |
| [23,] | ITGA3 | | ITGA3 | | 0.38 |
| [24,] | NFKBIA | | | NFKBIA | 0.32 |
| [25,] | LAMB1 | | | LAMB1 | 0.37 |
| [26,] | FHL1 | | | FHL1 | 0.31 |
| [27,] | INSIG1 | | | INSIG1 | 0.31 |
| [28,] | TIMP1 | | | TIMP1 | 0.48 |
| [29,] | GJA1 | | | GJA1 | 0.54 |
| [30,] | PSME2 | | | PSME2 | 0.34 |
| [31,] | PRG1 | | | PRG1 | 0.46 |
| [32,] | EXT1 | | | EXT1 | 0.35 |
| [33,] | DKFZP434J154 | | | DKFZP434J154 | 0.31 |
| [34,] | OPTN | | OPTN | | 0.31 |
| [35,] | M6PRBP1 | | M6PRBP1 | | 0.52 |
| [36,] | MVP | | | MVP | 0.34 |
| [37,] | VASP | | | VASP | 0.31 |
| [38,] | ARL7 | | | ARL7 | 0.39 |
| [39,] | NNMT | NNMT | | NNMT | 0.34 |
| [40,] | TAP1 | | | TAP1 | 0.3 |
| [41,] | COL1A1 | COL1A1 | COL1A1 | | 0.33 |
| [42,] | BASP1 | | BASP1 | | 0.35 |
| [43,] | PLOD2 | | | PLOD2 | 0.37 |
| [44,] | ATF3 | | | ATF3 | 0.42 |
| [45,] | PALM2-AKAP2 | | | PALM2-AKAP2 | 0.33 |
| [46,] | IL8 | | | IL8 | 0.34 |
| [47,] | ANPEP | | ANPEP | | 0.35 |
| [48,] | LOXL2 | | | LOXL2 | 0.32 |
| [49,] | TGFB1 | | TGFB1 | | 0.31 |
| [50,] | IL4R | | | IL4R | 0.31 |
| [51,] | DGKA | | | DGKA | 0.32 |
| [52,] | STC2 | | | STC2 | 0.31 |
| [53,] | SEC61G | | | SEC61G | 0.41 |
| [54,] | NFIL3 | NFIL3 | NFIL3 | | 0.47 |
| [55,] | RGS3 | | | RGS3 | 0.37 |
| [56,] | NK4 | | NK4 | | 0.34 |
| [57,] | F2R | | | F2R | 0.34 |
| [58,] | TPM2 | | | TPM2 | 0.35 |
| [59,] | PSMB9 | PSMB9 | | PSMB9 | 0.34 |
| [60,] | LOX | | | LOX | 0.37 |
| [61,] | STC1 | | | STC1 | 0.35 |
| [62,] | CSPG2 | CSPG2 | CSPG2 | | 0.35 |
| [63,] | PTGER4 | | | PTGER4 | 0.31 |
| [64,] | IL6 | | | IL6 | 0.34 |
| [65,] | SMAD3 | | | SMAD3 | 0.38 |
| [66,] | PLAU | PLAU | PLAU | | 0.35 |
| [67,] | WNT5A | | | WNT5A | 0.44 |
| [68,] | BDNF | | | BDNF | 0.34 |
| [69,] | TNFRSF1A | TNFRSF1A | | TNFRSF1A | 0.46 |
| [70,] | FLNC | | | FLNC | 0.34 |
| [71,] | DKFZP564K0822 | | | DKFZP564K0822 | 0.34 |
| [72,] | FLOT1 | | | FLOT1 | 0.38 |
| [73,] | PTRF | | | PTRF | 0.39 |
| [74,] | HLA-B | | | HLA-B | 0.36 |
| [75,] | COL6A2 | COL6A2 | COL6A2 | | 0.32 |
| [76,] | MGC4083 | | | MGC4083 | 0.32 |
| [77,] | TNFRSF10B | | | TNFRSF10B | 0.34 |
| [78,] | PLAGL1 | | | PLAGL1 | 0.31 |
| [79,] | PNMA2 | | | PNMA2 | 0.38 |
| [80,] | TFPI | | | TFPI | 0.38 |
| [81,] | LAT | | | LAT | 0.46 |
| [82,] | GZMB | | | GZMB | 0.51 |
| [83,] | CYR61 | | | CYR61 | 0.37 |
| [84,] | PLAUR | PLAUR | | PLAUR | 0.35 |
| [85,] | FSCN1 | FSCN1 | | FSCN1 | 0.32 |
| [86,] | ERP70 | | | ERP70 | 0.32 |
| [87,] | AF1Q | | | AF1Q | 0.3 |
| [88,] | UBC | | UBC | | 0.37 |
| [89,] | FGFR1 | | FGFR1 | | 0.33 |
| [90,] | HIC | | | HIC | 0.33 |
| [91,] | BAX | | BAX | | 0.35 |
| [92,] | COL4A2 | COL4A2 | COL4A2 | | 0.32 |
| [93,] | COL6A1 | | | COL6A1 | 0.32 |
| [94,] | IFITM3 | | | IFITM3 | 0.3 |
| [95,] | MAP1B | | | MAP1B | 0.38 |
| [96,] | FLJ46603 | | | FLJ46603 | 0.37 |
| [97,] | RAFTLIN | | | RAFTLIN | 0.34 |
| [98,] | RRAS | | | RRAS | 0.31 |
| [99,] | FTL | | | FTL | 0.3 |
| [100,] | KIAA0877 | | | KIAA0877 | 0.31 |
| [101,] | MT1E | MT1E | | MT1E | 0.31 |
| [102,] | CDC10 | | | CDC10 | 0.51 |
| [103,] | DOCK2 | | | DOCK2 | 0.32 |
| [104,] | TRIM22 | | | TRIM22 | 0.36 |
| [105,] | RIS1 | | | RIS1 | 0.37 |
| [106,] | BCAT1 | | | BCAT1 | 0.42 |
| [107,] | PRF1 | | | PRF1 | 0.34 |
| [108,] | DBN1 | | | DBN1 | 0.36 |
| [109,] | MT1K | | | MT1K | 0.3 |
| [110,] | TMSB10 | | | TMSB10 | 0.42 |
| [111,] | RAB31 | | RAB31 | | 0.45 |
| [112,] | FLJ10350 | | | FLJ10350 | 0.4 |
| [113,] | C1orf24 | | | C1orf24 | 0.34 |
| [114,] | NME7 | | | NME7 | 0.46 |
| [115,] | TMEM22 | | | TMEM22 | 0.3 |
| [116,] | TPK1 | | | TPK1 | 0.37 |
| [117,] | COL5A2 | | | COL5A2 | 0.34 |
| [118,] | ELK3 | | | ELK3 | 0.38 |
| [119,] | CYLD | | | CYLD | 0.4 |
| [120,] | ADAMTS1 | | | ADAMTS1 | 0.31 |
| [121,] | EHD2 | | | EHD2 | 0.41 |
| [122,] | ACTB | ACTB | | ACTB | 0.33 |

TABLE 17
Methyl-GAG (Methyl glyoxal bis(amidinohydrazone)
dihydrochloride)

| | List_2006 | HU6800 | List_Prior | List_Preferr | Correlation |
|---|---|---|---|---|---|
| [1,] | PTMA | | PTMA | | 0.32 |
| [2,] | SSRP1 | | | SSRP1 | 0.37 |
| [3,] | NUDC | | | NUDC | 0.35 |
| [4,] | CTSC | | | CTSC | 0.35 |
| [5,] | AP1G2 | | | AP1G2 | 0.33 |
| [6,] | PSME2 | | | PSME2 | 0.3 |
| [7,] | LBR | | | LBR | 0.38 |
| [8,] | EFNB2 | | | EFNB2 | 0.31 |
| [9,] | SERPINA1 | | | SERPINA1 | 0.34 |
| [10,] | SSSCA1 | | | SSSCA1 | 0.32 |
| [11,] | EZH2 | | | EZH2 | 0.36 |
| [12,] | MYB | MYB | | MYB | 0.33 |
| [13,] | PRIM1 | | | PRIM1 | 0.39 |
| [14,] | H2AFX | | | H2AFX | 0.33 |
| [15,] | HMGA1 | | | HMGA1 | 0.35 |
| [16,] | HMMR | | | HMMR | 0.33 |
| [17,] | TK2 | | | TK2 | 0.42 |
| [18,] | WHSC1 | | | WHSC1 | 0.35 |
| [19,] | DIAPH1 | | | DIAPH1 | 0.34 |
| [20,] | LAMB3 | | | LAMB3 | 0.31 |
| [21,] | DPAGT1 | | | DPAGT1 | 0.42 |
| [22,] | UCK2 | | | UCK2 | 0.31 |
| [23,] | SERPINB1 | | | SERPINB1 | 0.31 |
| [24,] | MDN1 | | | MDN1 | 0.35 |
| [25,] | BRRN1 | | | BRRN1 | 0.33 |
| [26,] | G0S2 | | | G0S2 | 0.43 |
| [27,] | RAC2 | | | RAC2 | 0.35 |
| [28,] | MGC21654 | | | MGC21654 | 0.36 |
| [29,] | GTSE1 | | | GTSE1 | 0.35 |
| [30,] | TACC3 | | | TACC3 | 0.31 |
| [31,] | PLEK2 | | | PLEK2 | 0.32 |
| [32,] | PLAC8 | | | PLAC8 | 0.31 |
| [33,] | HNRPD | | | HNRPD | 0.35 |
| [34,] | PNAS-4 | | | PNAS-4 | 0.3 |

TABLE 18
Carboplatin biomarkers

| | List_2006 | HU6800 | List_Prior | List_Preferr | Correlation |
|---|---|---|---|---|---|
| [1,] | MSN | | MSN | | 0.31 |
| [2,] | ITGA5 | | | ITGA5 | 0.43 |
| [3,] | VIM | | VIM | | 0.34 |
| [4,] | TNFAIP3 | | | TNFAIP3 | 0.4 |
| [5,] | CSPG2 | | CSPG2 | | 0.35 |
| [6,] | WNT5A | | | WNT5A | 0.34 |
| [7,] | FOXF2 | | | FOXF2 | 0.36 |
| [8,] | LOC94105 | | | LOC94105 | 0.32 |
| [9,] | IFI16 | | | IFI16 | 0.38 |
| [10,] | LRRN3 | | | LRRN3 | 0.33 |
| [11,] | FGFR1 | | FGFR1 | | 0.37 |
| [12,] | DOCK10 | | | DOCK10 | 0.4 |
| [13,] | LEPRE1 | | | LEPRE1 | 0.32 |
| [14,] | COL5A2 | | | COL5A2 | 0.3 |
| [15,] | ADAMTS1 | | | ADAMTS1 | 0.34 |

TABLE 19
5-FU (5-Fluorouracil) biomarkers

| | List_2006 | HU6800 | List_Prior | List_Preferr | Correlation |
|---|---|---|---|---|---|
| [1,] | RPL18 | | | RPL18 | 0.39 |
| [2,] | RPL10A | | | RPL10A | 0.36 |
| [3,] | RNPS1 | | RNPS1 | | 0.3 |
| [4,] | ANAPC5 | | | ANAPC5 | 0.5 |
| [5,] | EEF1B2 | | | EEF1B2 | 0.4 |
| [6,] | RPL13A | | | RPL13A | 0.38 |
| [7,] | RPS15 | | | RPS15 | 0.34 |
| [8,] | AKAP1 | | | AKAP1 | 0.37 |
| [9,] | NDUFAB1 | | | NDUFAB1 | 0.3 |
| [10,] | APRT | | | APRT | 0.32 |
| [11,] | ZNF593 | | | ZNF593 | 0.37 |
| [12,] | MRP63 | | | MRP63 | 0.31 |
| [13,] | IL6R | | | IL6R | 0.31 |
| [14,] | RPL13 | | RPL13 | | 0.31 |
| [15,] | SART3 | | | SART3 | 0.35 |
| [16,] | RPS6 | | RPS6 | | 0.49 |
| [17,] | UCK2 | | | UCK2 | 0.38 |
| [18,] | RPL3 | | RPL3 | | 0.32 |
| [19,] | RPL17 | | | RPL17 | 0.34 |
| [20,] | RPS2 | | | RPS2 | 0.32 |
| [21,] | PCCB | | | PCCB | 0.31 |
| [22,] | TOMM20 | | | TOMM20 | 0.39 |
| [23,] | SHMT2 | | | SHMT2 | 0.36 |
| [24,] | RPLP0 | | | RPLP0 | 0.3 |
| [25,] | GTF3A | | | GTF3A | 0.5 |
| [26,] | STOML2 | | | STOML2 | 0.4 |
| [27,] | DKFZp564J157 | | | DKFZp564J157 | 0.38 |
| [28,] | MRPS2 | | | MRPS2 | 0.34 |
| [29,] | ALG5 | | | ALG5 | 0.37 |
| [30,] | CALML4 | | | CALML4 | 0.3 |

TABLE 20
Rituximab (e.g., Mabthera) biomarkers

| | List_2006 | List_Prior | List_Preferr | Correlation |
|---|---|---|---|---|
| [1,] | ITK | ITK | | 0.36 |
| [2,] | KIFC1 | | KIFC1 | 0.36 |
| [3,] | VLDLR | | VLDLR | 0.39 |
| [4,] | RUNX1 | | RUNX1 | 0.32 |
| [5,] | PAFAH1B3 | | PAFAH1B3 | 0.32 |
| [6,] | H1FX | | H1FX | 0.43 |
| [7,] | RNF144 | | RNF144 | 0.38 |
| [8,] | TMSNB | | TMSNB | 0.47 |
| [9,] | CRY1 | | CRY1 | 0.37 |
| [10,] | MAZ | | MAZ | 0.33 |
| [11,] | SLA | | SLA | 0.35 |
| [12,] | SRF | | SRF | 0.37 |
| [13,] | UMPS | | UMPS | 0.41 |
| [14,] | CD3Z | | CD3Z | 0.33 |
| [15,] | PRKCQ | | PRKCQ | 0.31 |
| [16,] | HNRPM | | HNRPM | 0.45 |
| [17,] | ZAP70 | | ZAP70 | 0.38 |
| [18,] | ADD1 | | ADD1 | 0.31 |
| [19,] | RFC5 | | RFC5 | 0.35 |
| [20,] | TM4SF2 | | TM4SF2 | 0.33 |
| [21,] | PFN2 | | PFN2 | 0.3 |
| [22,] | BMI1 | | BMI1 | 0.31 |
| [23,] | TUBGCP3 | | TUBGCP3 | 0.33 |
| [24,] | ATP6V1B2 | | ATP6V1B2 | 0.42 |
| [25,] | RALY | RALY | | 0.31 |
| [26,] | PSMC5 | PSMC5 | | 0.36 |
| [27,] | CD1D | | CD1D | 0.32 |
| [28,] | ADA | | ADA | 0.34 |
| [29,] | CD99 | | CD99 | 0.33 |
| [30,] | CD2 | | CD2 | 0.43 |
| [31,] | CNP | | CNP | 0.48 |
| [32,] | ERG | | ERG | 0.47 |
| [33,] | MYL6 | MYL6 | | 0.41 |
| [34,] | CD3E | | CD3E | 0.36 |
| [35,] | CD1A | | CD1A | 0.46 |
| [36,] | CD1B | CD1B | | 0.47 |
| [37,] | STMN1 | STMN1 | | 0.32 |
| [38,] | PSMC3 | | PSMC3 | 0.38 |
| [39,] | RPS4Y1 | | RPS4Y1 | 0.36 |
| [40,] | AKT1 | | AKT1 | 0.38 |
| [41,] | TAL1 | | TAL1 | 0.37 |
| [42,] | GNA15 | GNA15 | | 0.37 |
| [43,] | UBE2A | | UBE2A | 0.35 |
| [44,] | TCF12 | | TCF12 | 0.35 |
| [45,] | UBE2S | | UBE2S | 0.52 |
| [46,] | CCND3 | | CCND3 | 0.38 |
| [47,] | PAX6 | | PAX6 | 0.35 |
| [48,] | MDK | MDK | | 0.3 |
| [49,] | CAPG | CAPG | | 0.36 |
| [50,] | RAG2 | | RAG2 | 0.39 |
| [51,] | ACTN1 | ACTN1 | | 0.37 |
| [52,] | GSTM2 | | GSTM2 | 0.47 |
| [53,] | SATB1 | | SATB1 | 0.36 |
| [54,] | NASP | | NASP | 0.3 |
| [55,] | IGFBP2 | | IGFBP2 | 0.46 |
| [56,] | CDH2 | | CDH2 | 0.49 |
| [57,] | CRABP1 | | CRABP1 | 0.36 |
| [58,] | DBN1 | | DBN1 | 0.49 |
| [59,] | CTNNA1 | CTNNA1 | | 0.53 |
| [60,] | AKR1C1 | | AKR1C1 | 0.32 |
| [61,] | CACNB3 | | CACNB3 | 0.37 |
| [62,] | FARSLA | FARSLA | | 0.35 |
| [63,] | CASP2 | | CASP2 | 0.42 |
| [64,] | CASP2 | | CASP2 | 0.31 |
| [65,] | E2F4 | E2F4 | | 0.36 |
| [66,] | LCP2 | | LCP2 | 0.35 |
| [67,] | CASP6 | | CASP6 | 0.32 |
| [68,] | MYB | | MYB | 0.3 |
| [69,] | SFRS6 | | SFRS6 | 0.44 |
| [70,] | GLRB | | GLRB | 0.34 |
| [71,] | NDN | | NDN | 0.39 |
| [72,] | CPSF1 | CPSF1 | | 0.33 |
| [73,] | GNAQ | | GNAQ | 0.44 |
| [74,] | TUSC3 | | TUSC3 | 0.41 |
| [75,] | GNAQ | | GNAQ | 0.54 |
| [76,] | JARID2 | | JARID2 | 0.44 |
| [77,] | OCRL | | OCRL | 0.5 |
| [78,] | FHL1 | | FHL1 | 0.36 |
| [79,] | EZH2 | | EZH2 | 0.4 |
| [80,] | SMOX | | SMOX | 0.35 |
| [81,] | SLC4A2 | | SLC4A2 | 0.35 |
| [82,] | UFD1L | | UFD1L | 0.3 |
| [83,] | SEPW1 | SEPW1 | | 0.31 |
| [84,] | ZNF32 | | ZNF32 | 0.35 |
| [85,] | HTATSF1 | | HTATSF1 | 0.35 |
| [86,] | SHD1 | | SHD1 | 0.43 |
| [87,] | PTOV1 | | PTOV1 | 0.42 |
| [88,] | NXF1 | | NXF1 | 0.46 |
| [89,] | FYB | | FYB | 0.47 |
| [90,] | TRIM28 | | TRIM28 | 0.38 |
| [91,] | BC008967 | | BC008967 | 0.4 |
| [92,] | TRB@ | | TRB@ | 0.3 |
| [93,] | TFRC | TFRC | | 0.31 |
| [94,] | H1F0 | | H1F0 | 0.36 |
| [95,] | CD3D | | CD3D | 0.32 |
| [96,] | CD3G | | CD3G | 0.4 |
| [97,] | CENPB | | CENPB | 0.36 |
| [98,] | ALDH2 | | ALDH2 | 0.33 |
| [99,] | ANXA1 | | ANXA1 | 0.35 |
| [100,] | H2AFX | | H2AFX | 0.51 |
| [101,] | CD1E | | CD1E | 0.33 |
| [102,] | DDX5 | | DDX5 | 0.39 |
| [103,] | ABL1 | ABL1 | | 0.3 |
| [104,] | CCNA2 | | CCNA2 | 0.3 |
| [105,] | ENO2 | | ENO2 | 0.35 |
| [106,] | SNRPB | | SNRPB | 0.38 |
| [107,] | GATA3 | | GATA3 | 0.36 |
| [108,] | RRM2 | | RRM2 | 0.48 |
| [109,] | GLUL | | GLUL | 0.4 |
| [110,] | TCF7 | TCF7 | | 0.39 |
| [111,] | FGFR1 | FGFR1 | | 0.33 |
| [112,] | SOX4 | | SOX4 | 0.3 |
| [113,] | MAL | | MAL | 0.3 |
| [114,] | NUCB2 | NUCB2 | | 0.38 |
| [115,] | SMA3 | SMA3 | | 0.31 |
| [116,] | FAT | FAT | | 0.52 |
| [117,] | UNG | | UNG | 0.31 |
| [118,] | ARHGDIB | | ARHGDIB | 0.36 |
| [119,] | RUNX1 | | RUNX1 | 0.38 |
| [120,] | MPHOSPH6 | | MPHOSPH6 | 0.5 |
| [121,] | DCTN1 | | DCTN1 | 0.34 |
| [122,] | SH3GL3 | | SH3GL3 | 0.38 |
| [123,] | VIM | VIM | | 0.41 |
| [124,] | PLEKHC1 | | PLEKHC1 | 0.3 |
| [125,] | CD47 | | CD47 | 0.32 |
| [126,] | POLR2F | | POLR2F | 0.37 |
| [127,] | RHOH | | RHOH | 0.43 |
| [128,] | ADD1 | | ADD1 | 0.46 |
| [129,] | ATP2A3 | ATP2A3 | | 0.38 |

TABLE 21
Radiation sensitivity biomarkers

| | List_2006 | HU6800 | List_Prior | List_Preferr | Correlation |
|---|---|---|---|---|---|
| [1,] | TRA1 | | | TRA1 | 0.36 |
| [2,] | ACTN4 | | | ACTN4 | 0.36 |
| [3,] | WARS | | WARS | | 0.39 |
| [4,] | CALM1 | | | CALM1 | 0.32 |
| [5,] | CD63 | CD63 | | CD63 | 0.32 |
| [6,] | CD81 | | CD81 | | 0.43 |
| [7,] | FKBP1A | | | FKBP1A | 0.38 |
| [8,] | CALU | | | CALU | 0.47 |
| [9,] | IQGAP1 | | | IQGAP1 | 0.37 |
| [10,] | CTSB | | CTSB | | 0.33 |
| [11,] | MGC8721 | | | MGC8721 | 0.35 |
| [12,] | STAT1 | | | STAT1 | 0.37 |
| [13,] | TACC1 | | | TACC1 | 0.41 |
| [14,] | TM4SF8 | | | TM4SF8 | 0.33 |
| [15,] | CD59 | | | CD59 | 0.31 |
| [16,] | CKAP4 | CKAP4 | | CKAP4 | 0.45 |
| [17,] | DUSP1 | DUSP1 | | DUSP1 | 0.38 |
| [18,] | RCN1 | | | RCN1 | 0.31 |
| [19,] | MGC8902 | | | MGC8902 | 0.35 |
| [20,] | LGALS1 | LGALS1 | | LGALS1 | 0.33 |
| [21,] | BHLHB2 | | | BHLHB2 | 0.3 |
| [22,] | RRBP1 | | | RRBP1 | 0.31 |
| [23,] | PKM2 | | PKM2 | | 0.33 |
| [24,] | PRNP | | | PRNP | 0.42 |
| [25,] | PPP2CB | | PPP2CB | | 0.31 |
| [26,] | CNN3 | | CNN3 | | 0.36 |
| [27,] | ANXA2 | ANXA2 | ANXA2 | | 0.32 |
| [28,] | IER3 | | | IER3 | 0.34 |
| [29,] | JAK1 | | JAK1 | | 0.33 |
| [30,] | MARCKS | | | MARCKS | 0.43 |
| [31,] | LUM | | | LUM | 0.48 |
| [32,] | FER1L3 | | | FER1L3 | 0.47 |
| [33,] | SLC20A1 | | | SLC20A1 | 0.41 |
| [34,] | EIF4G3 | | EIF4G3 | | 0.36 |
| [35,] | HEXB | | | HEXB | 0.46 |
| [36,] | EXT1 | | | EXT1 | 0.47 |
| [37,] | TJP1 | | | TJP1 | 0.32 |
| [38,] | CTSL | CTSL | | CTSL | 0.38 |
| [39,] | SLC39A6 | | | SLC39A6 | 0.36 |
| [40,] | RIOK3 | | | RIOK3 | 0.38 |
| [41,] | CRK | | | CRK | 0.37 |
| [42,] | NNMT | | | NNMT | 0.37 |
| [43,] | COL1A1 | | COL1A1 | | 0.35 |
| [44,] | TRAM2 | TRAM2 | | TRAM2 | 0.35 |
| [45,] | ADAM9 | | | ADAM9 | 0.52 |
| [46,] | DNAJC7 | | | DNAJC7 | 0.38 |
| [47,] | PLSCR1 | | | PLSCR1 | 0.35 |
| [48,] | PRSS23 | | | PRSS23 | 0.3 |
| [49,] | PLOD2 | | | PLOD2 | 0.36 |
| [50,] | NPC1 | | | NPC1 | 0.39 |
| [51,] | TOB1 | | | TOB1 | 0.37 |
| [52,] | GFPT1 | | | GFPT1 | 0.47 |
| [53,] | IL8 | | | IL8 | 0.36 |
| [54,] | DYRK2 | | DYRK2 | | 0.3 |
| [55,] | PYGL | | | PYGL | 0.46 |
| [56,] | LOXL2 | | | LOXL2 | 0.49 |
| [57,] | KIAA0355 | | | KIAA0355 | 0.36 |
| [58,] | UGDH | | | UGDH | 0.49 |
| [59,] | NFIL3 | | NFIL3 | | 0.53 |
| [60,] | PURA | | | PURA | 0.32 |
| [61,] | ULK2 | | | ULK2 | 0.37 |
| [62,] | CENTG2 | | | CENTG2 | 0.35 |
| [63,] | NID2 | | | NID2 | 0.42 |
| [64,] | CAP350 | | | CAP350 | 0.31 |
| [65,] | CXCL1 | | | CXCL1 | 0.36 |
| [66,] | BTN3A3 | | | BTN3A3 | 0.35 |
| [67,] | IL6 | | | IL6 | 0.32 |
| [68,] | WNT5A | | | WNT5A | 0.3 |
| [69,] | FOXF2 | | | FOXF2 | 0.44 |
| [70,] | LPHN2 | | | LPHN2 | 0.34 |
| [71,] | CDH11 | | | CDH11 | 0.39 |
| [72,] | P4HA1 | | | P4HA1 | 0.33 |
| [73,] | GRP58 | | | GRP58 | 0.44 |
| [74,] | ACTN1 | ACTN1 | ACTN1 | | 0.41 |
| [75,] | CAPN2 | | CAPN2 | | 0.54 |
| [76,] | DSIPI | | | DSIPI | 0.44 |
| [77,] | MAP1LC3B | | | MAP1LC3B | 0.5 |
| [78,] | GALIG | GALIG | | GALIG | 0.36 |
| [79,] | IGSF4 | | | IGSF4 | 0.4 |
| [80,] | IRS2 | | | IRS2 | 0.35 |
| [81,] | ATP2A2 | | | ATP2A2 | 0.35 |
| [82,] | OGT | | | OGT | 0.3 |
| [83,] | TNFRSF10B | | | TNFRSF10B | 0.31 |
| [84,] | KIAA1128 | | | KIAA1128 | 0.35 |
| [85,] | TM4SF1 | | | TM4SF1 | 0.35 |
| [86,] | RBPMS | | | RBPMS | 0.43 |
| [87,] | RIPK2 | | | RIPK2 | 0.42 |
| [88,] | CBLB | | | CBLB | 0.46 |
| [89,] | NR1D2 | | | NR1D2 | 0.47 |
| [90,] | BTN3A2 | | BTN3A2 | | 0.38 |
| [91,] | SLC7A11 | | | SLC7A11 | 0.4 |
| [92,] | MPZL1 | | | MPZL1 | 0.3 |
| [93,] | IGFBP3 | IGFBP3 | IGFBP3 | | 0.31 |
| [94,] | SSA2 | | | SSA2 | 0.36 |
| [95,] | FN1 | FN1 | FN1 | | 0.32 |
| [96,] | NQO1 | | | NQO1 | 0.4 |
| [97,] | ASPH | | | ASPH | 0.36 |
| [98,] | ASAH1 | | | ASAH1 | 0.33 |
| [99,] | MGLL | | | MGLL | 0.35 |
| [100,] | SERPINB6 | | | SERPINB6 | 0.51 |
| [101,] | HSPA5 | | | HSPA5 | 0.33 |
| [102,] | ZFP36L1 | | | ZFP36L1 | 0.39 |
| [103,] | COL4A2 | | COL4A2 | | 0.3 |
| [104,] | COL4A1 | | | COL4A1 | 0.3 |
| [105,] | CD44 | | | CD44 | 0.35 |
| [106,] | SLC39A14 | | | SLC39A14 | 0.38 |
| [107,] | NIPA2 | | | NIPA2 | 0.36 |
| [108,] | FKBP9 | | | FKBP9 | 0.48 |
| [109,] | IL6ST | | | IL6ST | 0.4 |
| [110,] | DKFZP564G2022 | | | DKFZP564G2022 | 0.39 |
| [111,] | PPAP2B | | | PPAP2B | 0.33 |
| [112,] | MAP1B | | | MAP1B | 0.3 |
| [113,] | MAPK1 | | | MAPK1 | 0.3 |
| [114,] | MYO1B | | | MYO1B | 0.38 |
| [115,] | CAST | CAST | | CAST | 0.31 |
| [116,] | RRAS2 | | | RRAS2 | 0.52 |
| [117,] | QKI | | | QKI | 0.31 |
| [118,] | LHFPL2 | | | LHFPL2 | 0.36 |
| [119,] | SEPT10 | | | SEPT10 | 0.38 |
| [120,] | ARHE | | | ARHE | 0.5 |
| [121,] | KIAA1078 | | | KIAA1078 | 0.34 |
| [122,] | FTL | | | FTL | 0.38 |
| [123,] | KIAA0877 | | | KIAA0877 | 0.41 |
| [124,] | PLCB1 | | | PLCB1 | 0.3 |
| [125,] | KIAA0802 | | | KIAA0802 | 0.32 |
| [126,] | KPNB1 | | KPNB1 | | 0.37 |
| [127,] | RAB3GAP | | | RAB3GAP | 0.43 |
| [128,] | SERPINB1 | | | SERPINB1 | 0.46 |
| [129,] | TIMM17A | | | TIMM17A | 0.38 |
| [130,] | SOD2 | | | SOD2 | 0.35 |
| [131,] | HLA-A | HLA-A | | HLA-A | 0.33 |
| [132,] | NOMO2 | | | NOMO2 | 0.43 |
| [133,] | LOC55831 | | | LOC55831 | 0.32 |
| [134,] | PHLDA1 | | | PHLDA1 | 0.32 |
| [135,] | TMEM2 | | | TMEM2 | 0.47 |
| [136,] | MLPH | | | MLPH | 0.35 |
| [137,] | FAD104 | | | FAD104 | 0.34 |
| [138,] | LRRC5 | | | LRRC5 | 0.42 |
| [139,] | RAB7L1 | | | RAB7L1 | 0.41 |
| [140,] | FLJ35036 | | | FLJ35036 | 0.36 |
| [141,] | DOCK10 | | | DOCK10 | 0.41 |
| [142,] | LRP12 | | | LRP12 | 0.36 |
| [143,] | TXNDC5 | | | TXNDC5 | 0.4 |
| [144,] | CDC14B | | | CDC14B | 0.39 |
| [145,] | HRMT1L1 | | | HRMT1L1 | 0.38 |
| [146,] | CORO1C | | | CORO1C | 0.38 |
| [147,] | DNAJC10 | | | DNAJC10 | 0.31 |
| [148,] | TNPO1 | | | TNPO1 | 0.33 |
| [149,] | LONP | | | LONP | 0.32 |
| [150,] | AMIGO2 | | | AMIGO2 | 0.38 |
| [151,] | DNAPTP6 | | | DNAPTP6 | 0.31 |
| [152,] | ADAMTS1 | | | ADAMTS1 | 0.37 |
| [153,] | | CCL21 | | | |
| [154,] | | SCARB2 | | | |
| [155,] | | MAD2L1BP | | | |
| [156,] | | PTS | | | |
| [157,] | | NBL1 | | | |
| [158,] | | CD151 | | | |
| [159,] | | CRIP2 | | | |
| [160,] | | UGCG | | | |
| [161,] | | PRSS11 | | | |
| [162,] | | MME | | | |
| [163,] | | CBR1 | | | |
| [164,] | | DUSP3 | | | |
| [165,] | | PFN2 | | | |
| [166,] | | MICA | | | |
| [167,] | | FTH1 | | | |
| [168,] | | RHOC | | | |
| [169,] | | ZAP128 | | | |
| [170,] | | PON2 | | | |
| [171,] | | COL5A2 | | | |
| [172,] | | CST3 | | | |
| [173,] | | MCAM | | | |
| [174,] | | MMP2 | | | |
| [175,] | | CTSD | | | |
| [176,] | | ALDH3A1 | | | |
| [177,] | | CSRP1 | | | |
| [178,] | | S100A4 | | | |
| [179,] | | CALD1 | | | |
| [180,] | | CTGF | | | |
| [181,] | | CAPG | | | |
| [182,] | | TAGLN | | | |
| [183,] | | FSTL1 | | | |
| [184,] | | SCTR | | | |
| [185,] | | BLVRA | | | |
| [186,] | | COPEB | | | |
| [187,] | | DIPA | | | |
| [188,] | | SMARCD3 | | | |
| [189,] | | MVP | | | |
| [190,] | | PEA15 | | | |
| [191,] | | S100A13 | | | |
| [192,] | | ECE1 | | | |

TABLE 22
Vincristine biomarkers.

| | | | |
|---|---|---|---|
| SEQ | | | |
| ID | | Corre- | |
| NO | Gene | lation | Medianprobe |

| | | | |
|---|---|---|---|
| 1 | SLC25A5 | 0.32 | TCCTGTACTTGTCCTCAGCTTGGGC |
| 2 | RPL10 | 0.38 | GCCCCACTGGACAACACTGATTCCT |
| 3 | RPL12 | 0.31 | TGCCTGCTCCTGTACTTGTCCTCAG |
| 4 | RPS4X | 0.39 | AAATGTTTCCTTGTGCCTGCTCCTG |
| 5 | EIF5A | 0.31 | TCCTGTACTTGTCCTCAGCTTGGGC |
| 6 | BLMH | 0.32 | AAGCCTATACGTTTCTGTGGAGTAA |
| 7 | TBCA | 0.3 | ACTTGTCCTCAGCTTGGGCTTCTTC |
| 8 | MDH2 | 0.34 | TCCTGTACTTGTCCTCAGCTTGGGC |
| 9 | S100A4 | 0.32 | TGGACCCCACTGGCTGAGAATCTGG |
| 10 | C14orf139 | 0.3 | TTGGACATCTCTAGTGTAGCTGCCA |

TABLE 23
Cisplatin biomarkers.

| | | | |
|---|---|---|---|
| SEQ | | | |
| ID | | Corre- | |
| NO | Gene | lation | Medianprobe |

| | | | |
|---|---|---|---|
| 11 | C1QR1 | 0.3 | CACCCAGCTGGTCCTGTGGATGGGA |
| 12 | SLA | 0.37 | TGCCTGCTCCTGTACTTGTCCTCAG |
| 13 | PTPN7 | 0.31 | ACTTGTCCTCAGCTTGGGCTTCTTC |
| 14 | ZNFN1A1 | 0.33 | CACCCAGCTGGTCCTGTGGATGGGA |
| 15 | CENTB1 | 0.37 | TTGGACATCTCTAGTGTAGCTGCCA |
| 16 | IFI16 | 0.31 | TCCTCCATCACCTGAAACACTGGAC |
| 17 | ARHGEF6 | 0.35 | TGCCTGCTCCTGTACTTGTCCTCAG |
| 18 | SEC31L2 | 0.32 | AAGCCTATACGTTTCTGTGGAGTAA |
| 19 | CD3Z | 0.32 | TTGGACATCTCTAGTGTAGCTGCCA |
| 20 | GZMB | 0.3 | TCCTCCATCACCTGAAACACTGGAC |
| 21 | CD3D | 0.34 | TCCTCCATCACCTGAAACACTGGAC |
| 22 | MAP4K1 | 0.32 | CACCCAGCTGGTCCTGTGGATGGGA |
| 23 | GPR65 | 0.39 | CACCCAGCTGGTCCTGTGGATGGGA |
| 24 | PRF1 | 0.31 | TCCTTGTGCCTGCTCCTGTACTTGT |
| 25 | ARHGAP15 | 0.35 | CACCCAGCTGGTCCTGTGGATGGGA |
| 26 | TM6SF1 | 0.41 | TGCCTGCTCCTGTACTTGTCCTCAG |
| 27 | TCF4 | 0.4 | AAATGTTTCCTTGTGCCTGCTCCTG |

TABLE 24
Etoposide biomarkers.

| | | | |
|---|---|---|---|
| SEQ | | | |
| ID | | Corre- | |
| NO | Gene | lation | Medianprobe |

| | | | |
|---|---|---|---|
| 28 | CD99 | 0.3 | AAGCCTATACGTTTCTGTGGAGTAA |
| 29 | INSIG1 | 0.35 | TCCTTGTGCCTGCTCCTGTACTTGT |
| 30 | PRG1 | 0.34 | GCCCCACTGGACAACACTGATTCCT |
| 31 | MUF1 | 0.35 | AAGCCTATACGTTTCTGTGGAGTAA |
| 32 | SLA | 0.37 | CACCCAGCTGGTCCTGTGGATGGGA |
| 33 | SSBP2 | 0.37 | TGGACCCCACTGGCTGAGAATCTGG |
| 34 | GNB5 | 0.35 | TCCTTGTGCCTGCTCCTGTACTTGT |
| 35 | MFNG | 0.33 | GCCCCACTGGACAACACTGATTCCT |
| 36 | PSMB9 | 0.31 | AAGCCTATACGTTTCTGTGGAGTAA |
| 37 | EVI2A | 0.41 | TCCTCCATCACCTGAAACACTGGAC |
| 38 | PTPN7 | 0.3 | AAGCCTATACGTTTCTGTGGAGTAA |
| 39 | PTGER4 | 0.3 | TGCCTGCTCCTGTACTTGTCCTCAG |
| 40 | CXorf9 | 0.3 | GCCCCACTGGACAACACTGATTCCT |
| 41 | ZNFN1A1 | 0.35 | ACTTGTCCTCAGCTTGGGCTTCTTC |
| 42 | CENTB1 | 0.3 | TGGACCCCACTGGCTGAGAATCTGG |
| 43 | NAP1L1 | 0.31 | TCCTCCATCACCTGAAACACTGGAC |
| 44 | HLA-DRA | 0.34 | TGCCTGCTCCTGTACTTGTCCTCAG |
| 45 | IFI16 | 0.38 | CACCCAGCTGGTCCTGTGGATGGGA |
| 46 | ARHGEF6 | 0.33 | TGGACCCCACTGGCTGAGAATCTGG |
| 47 | PSCDBP | 0.4 | AAGCCTATACGTTTCTGTGGAGTAA |
| 48 | SELPLG | 0.35 | TTGGACATCTCTAGTGTAGCTGCCA |
| 49 | SEC31L2 | 0.42 | AAATGTTTCCTTGTGCCTGCTCCTG |
| 50 | CD3Z | 0.36 | TGCCTGCTCCTGTACTTGTCCTCAG |
| 51 | SH2D1A | 0.33 | CACCCAGCTGGTCCTGTGGATGGGA |
| 52 | GZMB | 0.34 | TGGACCCCACTGGCTGAGAATCTGG |
| 53 | SCN3A | 0.3 | GCCCCACTGGACAACACTGATTCCT |
| 54 | RAFTLIN | 0.39 | TCCTCCATCACCTGAAACACTGGAC |
| 55 | DOCK2 | 0.33 | TGCCTGCTCCTGTACTTGTCCTCAG |
| 56 | CD3D | 0.31 | ACTTGTCCTCAGCTTGGGCTTCTTC |
| 57 | ZAP70 | 0.35 | TCCTCCATCACCTGAAACACTGGAC |
| 58 | GPR65 | 0.35 | TGGACCCCACTGGCTGAGAATCTGG |
| 59 | PRF1 | 0.32 | TGGACCCCACTGGCTGAGAATCTGG |
| 60 | ARHGAP15 | 0.32 | ACTTGTCCTCAGCTTGGGCTTCTTC |
| 61 | NOTCH1 | 0.31 | TGCCTGCTCCTGTACTTGTCCTCAG |
| 62 | UBASH3A | 0.32 | ACTTGTCCTCAGCTTGGGCTTCTTC |

TABLE 25
Azaguanine biomarkers.

| | | | |
|---|---|---|---|
| SEQ | | | |
| ID | | Corre- | |
| NO | Gene | lation | Medianprobe |

| | | | |
|---|---|---|---|
| 63 | SRM | 0.32 | TGCCTGCTCCTGTACTTGTCCTCAG |
| 64 | SCARB1 | 0.4 | TTGGACATCTCTAGTGTAGCTGCCA |
| 65 | SIAT1 | 0.31 | AAATGTTTCCTTGTGCCTGCTCCTG |
| 66 | CUGBP2 | 0.37 | TGGACCCCACTGGCTGAGAATCTGG |
| 67 | WASPIP | 0.44 | TCCTGTACTTGTCCTCAGCTTGGGC |
| 68 | ITM2A | 0.31 | AAGCCTATACGTTTCTGTGGAGTAA |
| 69 | PALM2-AKAP2 | 0.31 | ACTTGTCCTCAGCTTGGGCTTCTTC |
| 70 | LNK | 0.43 | TTGGACATCTCTAGTGTAGCTGCCA |
| 71 | FCGR2A | 0.3 | TGCCTGCTCCTGTACTTGTCCTCAG |
| 72 | RUNX3 | 0.43 | TCCTGTACTTGTCCTCAGCTTGGGC |
| 73 | EVI2A | 0.4 | AAATGTTTCCTTGTGCCTGCTCCTG |
| 74 | BTN3A3 | 0.4 | ACTTGTCCTCAGCTTGGGCTTCTTC |
| 75 | LCP2 | 0.34 | TCCTTGTGCCTGCTCCTGTACTTGT |
| 76 | BCHE | 0.35 | TCCTCCATCACCTGAAACACTGGAC |
| 77 | LY96 | 0.47 | TGCCTGCTCCTGTACTTGTCCTCAG |
| 78 | LCP1 | 0.42 | ACTTGTCCTCAGCTTGGGCTTCTTC |
| 79 | IFI16 | 0.33 | CACCCAGCTGGTCCTGTGGATGGGA |
| 80 | MCAM | 0.37 | TTGGACATCTCTAGTGTAGCTGCCA |
| 81 | MEF2C | 0.41 | CACCCAGCTGGTCCTGTGGATGGGA |
| 82 | FYN | 0.31 | TCCTGTACTTGTCCTCAGCTTGGGC |
| 83 | C1orf38 | 0.37 | AAGCCTATACGTTTCTGTGGAGTAA |
| 84 | FCGR2C | 0.34 | TGCCTGCTCCTGTACTTGTCCTCAG |
| 85 | TNIK | 0.35 | AAGCCTATACGTTTCTGTGGAGTAA |
| 86 | AMPD2 | 0.3 | TCCTGTACTTGTCCTCAGCTTGGGC |
| 87 | SEPT6 | 0.41 | AAATGTTTCCTTGTGCCTGCTCCTG |
| 88 | RAFTLIN | 0.39 | TCCTTGTGCCTGCTCCTGTACTTGT |
| 89 | SLC43A3 | 0.52 | CACCCAGCTGGTCCTGTGGATGGGA |
| 90 | LPXN | 0.54 | AAGCCTATACGTTTCTGTGGAGTAA |
| 91 | CKIP-1 | 0.33 | TCCTGTACTTGTCCTCAGCTTGGGC |
| 92 | FLJ10539 | 0.33 | TCCTTGTGCCTGCTCCTGTACTTGT |
| 93 | FLJ35036 | 0.36 | AAGCCTATACGTTTCTGTGGAGTAA |
| 94 | DOCK10 | 0.3 | GCCCCACTGGACAACACTGATTCCT |
| 95 | TRPV2 | 0.31 | ACTTGTCCTCAGCTTGGGCTTCTTC |
| 96 | IFRG28 | 0.3 | TCCTTGTGCCTGCTCCTGTACTTGT |
| 97 | LEF1 | 0.31 | ACTTGTCCTCAGCTTGGGCTTCTTC |
| 98 | ADAMTS1 | 0.36 | TGGACCCCACTGGCTGAGAATCTGG |

TABLE 26
Carboplatin biomarkers.

| | | | |
|---|---|---|---|
| SEQ | | | |
| ID | | Corre- | |
| NO | Gene | lation | Medianprobe |

| | | | |
|---|---|---|---|
| 99 | ITGA5 | 0.43 | AAATGTTTCCTTGTGCCTGCTCCTG |
| 100 | TNFAIP3 | 0.4 | TGCCTGCTCCTGTACTTGTCCTCAG |
| 101 | WNT5A | 0.34 | TCCTCCATCACCTGAAACACTGGAC |
| 102 | FOXF2 | 0.36 | TGCCTGCTCCTGTACTTGTCCTCAG |
| 103 | LOC94105 | 0.32 | AAATGTTTCCTTGTGCCTGCTCCTG |
| 104 | IFI16 | 0.38 | TCCTCCATCACCTGAAACACTGGAC |
| 105 | LRRN3 | 0.33 | TTGGACATCTCTAGTGTAGCTGCCA |
| 106 | DOCK10 | 0.4 | TCCTGTACTTGTCCTCAGCTTGGGC |
| 107 | LEPRE1 | 0.32 | GCCCCACTGGACAACACTCATTCCT |
| 108 | ADAMTS1 | 0.34 | TGGACCCCACTGGCTGAGAATCTGG |

TABLE 27
Adriamycin biomarkers.

| | | | |
|---|---|---|---|
| SEQ | | | |
| ID | | Corre- | |
| NO | Gene | lation | Medianprobe |

| | | | |
|---|---|---|---|
| 109 | CD99 | 0.41 | AAGCCTATACGTTTCTGTGGAGTAA |
| 110 | ALDOC | 0.31 | TCCTTGTGCCTGCTCCTGTACTTGT |
| 111 | SLA | 0.35 | TGCCTGCTCCTGTACTTGTCCTCAG |
| 112 | SSBP2 | 0.34 | TCCTCCATCACCTGAAACACTGGAC |
| 113 | IL2RG | 0.38 | TCCTTGTGCCTGCTCCTGTACTTGT |
| 114 | CXorf9 | 0.32 | TGGACCCCACTGGCTGAGAATCTGG |
| 115 | RHOH | 0.31 | ACTTGTCCTCAGCTTGGGCTTCTTC |
| 116 | ZNFN1A1 | 0.43 | TTGGACATCTCTAGTGTAGCTGCCA |
| 117 | CENTB1 | 0.36 | AAGCCTATACGTTTCTGTGGAGTAA |
| 118 | MAP4K1 | 0.35 | TCCTCCATCACCTGAAACACTGGAC |
| 119 | CD3G | 0.31 | AAATGTTTCCTTGTGCCTGCTCCTG |
| 120 | CCR9 | 0.34 | CACCCAGCTGGTCCTGTGGATGGGA |
| 121 | CXCR4 | 0.3 | TCCTTGTGCCTGCTCCTGTACTTGT |
| 122 | ARHGEF6 | 0.31 | TCCTCCATCACCTGAAACACTGGAC |
| 123 | SELPLG | 0.31 | TGGACCCCACTGGCTGAGAATCTGG |
| 124 | SEC31L2 | 0.33 | TGCCTGCTCCTGTACTTGTCCTCAG |
| 125 | CD3Z | 0.37 | ACTTGTCCTCAGCTTGGGCTTCTTC |
| 126 | SH2D1A | 0.37 | TTGGACATCTCTAGTGTAGCTGCCA |
| 127 | CD1A | 0.4 | AAGCCTATACGTTTCTGTGGAGTAA |
| 128 | LAIR1 | 0.39 | AAGCCTATACGTTTCTGTGGAGTAA |
| 129 | TRB@ | 0.34 | TCCTCCATCACCTGAAACACTGGAC |
| 130 | CD3D | 0.33 | TCCTTGTGCCTGCTCCTGTACTTGT |
| 131 | WBSCR20C | 0.34 | ACTTGTCCTCAGCTTGGGCTTCTTC |
| 132 | ZAP70 | 0.33 | TCCTGTACTTGTCCTCAGCTTGGGC |
| 133 | IFI44 | 0.32 | TGCCTGCTCCTGTACTTGTCCTCAG |
| 134 | GPR65 | 0.31 | AAGCCTATACGTTTCTGTGGAGTAA |
| 135 | AIF1 | 0.3 | CACCCAGCTGGTCCTGTGGATGGGA |
| 136 | ARHGAP15 | 0.37 | TCCTGTACTTGTCCTCAGCTTGGGC |
| 137 | NARF | 0.3 | TCCTCCATCACCTGAAACACTGGAC |
| 138 | PACAP | 0.32 | CACCCAGCTGGTCCTGTGGATGGGA |

TABLE 28
Aclarubicin biomarkers.

| | | | |
|---|---|---|---|
| SEQ | | | |
| ID | | Corre- | |
| NO | Gene | lation | Medianprobe |

| | | | |
|---|---|---|---|
| 139 | RPL12 | 0.3 | AAATGTTTCCTTGTGCCTGCTCCTG |
| 140 | RPLP2 | 0.37 | TTGGACATCTCTAGTGTAGCTGCCA |
| 141 | MYB | 0.31 | TCCTTGTGCCTGCTCCTGTACTTGT |
| 142 | ZNFN1A1 | 0.34 | AAATGTTTCCTTGTGCCTGCTCCTG |
| 143 | SCAP1 | 0.33 | TGCCTGCTCCTGTACTTGTCCTCAG |
| 144 | STAT4 | 0.31 | AAATGTTTCCTTGTGCCTGCTCCTG |
| 145 | SP140 | 0.4 | AAGCCTATACGTTTCTGTGGAGTAA |
| 146 | AMPD3 | 0.3 | TGCCTGCTCCTGTACTTGTCCTCAG |
| 147 | TNFAIP8 | 0.4 | AAGCCTATACGTTTCTGTGGAGTAA |
| 148 | DDX18 | 0.31 | TCCTTGTGCCTGCTCCTGTACTTGT |
| 149 | TAF5 | 0.3 | TCCTTGTGCCTGCTCCTGTACTTGT |
| 150 | RPS2 | 0.34 | CACCCAGCTGGTCCTGTGGATGGGA |
| 151 | DOCK2 | 0.32 | AAGCCTATACGTTTCTGTGGAGTAA |
| 152 | GPR65 | 0.35 | AAGCCTATACGTTTCTGTGGAGTAA |
| 153 | HOXA9 | 0.33 | TCCTTGTGCCTGCTCCTGTACTTGT |
| 154 | FLJ12270 | 0.31 | AAATGTTTCCTTGTGCCTGCTCCTG |
| 155 | HNRPD | 0.4 | ACTTGTCCTCAGCTTGGGCTTCTTC |

TABLE 29
Mitoxantrone biomarkers.

| | | | |
|---|---|---|---|
| SEQ | | | |
| ID | | Corre- | |
| NO | Gene | lation | Medianprobe |

| | | | |
|---|---|---|---|
| 156 | PGAM1 | 0.32 | TGCCTGCTCCTGTACTTGTCCTCAG |
| 157 | DPYSL3 | 0.36 | AAATGTTTCCTTGTGCCTGCTCCTG |
| 158 | INSIG1 | 0.32 | TCCTTGTGCCTGCTCCTGTACTTGT |
| 159 | GJA1 | 0.31 | TTGGACATCTCTAGTGTAGCTGCCA |
| 160 | BNIP3 | 0.31 | TTGGACATCTCTAGTGTAGCTGCCA |
| 161 | PRG1 | 0.39 | GCCCCACTGGACAACACTGATTCCT |
| 162 | G6PD | 0.34 | TGCCTGCTCCTGTACTTGTCCTCAG |
| 163 | PLOD2 | 0.34 | GCCCCACTGGACAACACTGATTCCT |
| 164 | LOXL2 | 0.31 | TCCTTGTGCCTGCTCCTGTACTTGT |
| 165 | SSBP2 | 0.36 | TCCTCCATCACCTGAAACACTGGAC |
| 166 | C1orf29 | 0.35 | TCCTTGTGCCTGCTCCTGTACTTGT |
| 167 | TOX | 0.35 | TCCTTGTGCCTGCTCCTGTACTTGT |
| 168 | STC1 | 0.39 | TCCTGTACTTGTCCTCAGCTTGGGC |
| 169 | TNFRSF1A | 0.34 | AAATGTTTCCTTGTGCCTGCTCCTG |
| 170 | NCOR2 | 0.3 | TCCTCCATCACCTGAAACACTGGAC |
| 171 | NAP1L1 | 0.32 | TCCTTGTGCCTGCTCCTGTACTTGT |
| 172 | LOC94105 | 0.34 | AAGCCTATACGTTTCTGTGGAGTAA |
| 173 | ARHGEF6 | 0.34 | TCCTCCATCACCTGAAACACTGGAC |
| 174 | GATA3 | 0.35 | TCCTTGTGCCTGCTCCTGTACTTGT |
| 175 | TFPI | 0.31 | TCCTGTACTTGTCCTCAGCTTGGGC |
| 176 | CD3Z | 0.37 | AAGCCTATACGTTTCTGTGGAGTAA |
| 177 | AF1Q | 0.33 | GCCCCACTGGACAACACTGATTCCT |
| 178 | MAP1B | 0.34 | TGCCTGCTCCTGTACTTGTCCTCAG |
| 179 | CD3D | 0.31 | TCCTTGTGCCTGCTCCTGTACTTGT |
| 180 | BCAT1 | 0.32 | TCCTGTACTTGTCCTCAGCTTGGGC |
| 181 | IFI44 | 0.33 | TGGACCCCACTGGCTGAGAATCTGG |
| 182 | CUTC | 0.33 | AAATGTTTCCTTGTGCCTGCTCCTG |
| 183 | NAP1L2 | 0.33 | AAGCCTATACGTTTCTGTGGAGTAA |
| 184 | NME7 | 0.35 | AAATGTTTCCTTGTGCCTGCTCCTG |
| 185 | FLJ21159 | 0.33 | TCCTGTACTTGTCCTCAGCTTGGGC |

TABLE 30
Mitomycin biomarkers.

| SEQ | | | |
|---|---|---|---|
| ID | | Corre- | |
| NO | Gene | lation | Medianprobe |
| 186 | STC1 | 0.34 | TGCCTGCTCCTGTACTTGTCCTCAG |
| 187 | GPR65 | 0.32 | GCCCCACTGGACAACACTGATTCCT |
| 188 | DOCK10 | 0.35 | ACTTGTCCTCAGCTTGGGCTTCTTC |
| 189 | FAM46A | 0.36 | TCCTTGTGCCTGCTCCTGTACTTGT |
| 190 | LOC54103 | 0.39 | ACTTGTCCTCAGCTTGGGCTTCTTC |

TABLE 31
Paclitaxel (Taxol) biomarkers.

| | | | |
|---|---|---|---|
| SEQ | | | |
| ID | | Corre- | |
| NO | Gene | lation | Medianprobe |

| | | | |
|---|---|---|---|
| 191 | RPL10 | 0.31 | TCCTCCATCACCTGAAACACTGGAC |
| 192 | RPS4X | 0.31 | TCCTCCATCACCTGAAACACTGGAC |
| 193 | DKC1 | 0.3 | TCCTTGTGCCTGCTCCTGTACTTGT |
| 194 | DKFZP564C186 | 0.32 | ACTTGTCCTCAGCTTGGGGTTCTTC |
| 195 | PRP19 | 0.31 | TGCCTGCTCCTGTACTTGTCCTCAG |
| 196 | PAB9P40 | 0.33 | GCCCCACTGGACAACACTGATTCCT |
| 197 | HSA9761 | 0.37 | AAATGTTTCCTTGTGCCTGCTCCTG |
| 198 | GMDS | 0.3 | AAATGTTTCCTTGTGCCTGCTCCTG |
| 199 | CEP1 | 0.3 | AAATGTTTCCTTGTGCCTGCTCCTG |
| 200 | IL13RA2 | 0.34 | AAATGTTTCCTTGTGCCTGCTCCTG |
| 201 | MAGEB2 | 0.41 | ACTTGTCCTCAGCTTGGGCTTCTTC |
| 202 | HMGN2 | 0.35 | CACCCAGCTGGTCCTGTGGATGGGA |
| 203 | ALMS1 | 0.3 | TCCTCCATCACCTGAAACACTGGAC |
| 204 | GPR65 | 0.31 | TGCCTGCTCCTGTACTTGTCCTCAG |
| 205 | FLJ10774 | 0.31 | TGGACCCCACTGGCTGAGAATCTGG |
| 206 | NOL8 | 0.31 | TGCCTGCTCCTGTACTTGTCCTCAG |
| 207 | DAZAP1 | 0.32 | TGCCTGCTCCTGTACTTGTCCTCAG |
| 208 | SLC25A15 | 0.31 | TTGGACATCTCTAGTGTAGCTGCCA |
| 209 | PAF53 | 0.36 | TCCTCCATCACCTGAAACACTGGAC |
| 210 | PITPNC1 | 0.33 | TCCTCCATCACCTGAAACACTGGAC |
| 211 | SPANXC | 0.3 | TGGACCCCACTGGCTGAGAATCTGG |
| 212 | KIAA1393 | 0.33 | CACCCAGCTGGTCCTGTGGATGGGA |

TABLE 32
Gemcitabine (Gemzar) biomarkers.

| | | | |
|---|---|---|---|
| SEQ | | | |
| ID | | Corre- | |
| NO | Gene | lation | Medianprobe |

| | | | |
|---|---|---|---|
| 213 | UBE2L6 | 0.38 | CACCCAGCTGGTCCTGTGGATGGGA |
| 214 | TAP1 | 0.33 | CACCCAGCTGGTCCTGTGGATGGGA |
| 215 | F2R | 0.3 | TCCTGTACTTGTCCTCAGCTTGGGC |
| 216 | PSMB9 | 0.31 | TGCCTGCTCCTGTACTTGTCCTCAG |
| 217 | IL7R | 0.31 | AAGCCTATACGTTTCTGTGGAGTAA |
| 218 | TNFAIP8 | 0.33 | AAGCCTATACGTTTCTGTGGAGTAA |
| 219 | HLA-C | 0.33 | TGGACCCCACTGGCTGAGAATCTGG |
| 220 | IFI44 | 0.31 | TGGACCCCACTGGCTGAGAATCTGG |

TABLE 33
Taxotere (docetaxel) biomarkers.

| SEQ | | | |
|---|---|---|---|
| ID | | Corre- | |
| NO | Gene | lation | Medianprobe |
| 221 | ANP32B | 0.45 | GCCCCACTGGACAACACTGATTCCT |
| 222 | GTF3A | 0.31 | TTGGACATCTCTAGTGTAGCTGCCA |
| 223 | TRIM14 | 0.31 | ACTTGTCCTCAGCTTGGGCTTCTTC |
| 224 | SKP2 | 0.33 | GCCCCACTGGACAACACTGATTCCT |
| 225 | TRIP13 | 0.36 | TCCTGTACTTGTCCTCAGCTTGGGC |
| 226 | RFC3 | 0.45 | GCCCCACTGGACAACACTGATTCCT |
| 227 | CASP7 | 0.32 | TGCCTGCTCCTGTACTTGTCCTCAG |
| 228 | TXN | 0.36 | AAGCCTATACGTTTCTGTGGAGTAA |
| 229 | MCM5 | 0.34 | AAATGTTTCCTTGTGCCTGCTCCTG |
| 230 | PTGES2 | 0.39 | AAATGTTTCCTTGTGCCTGCTCCTG |
| 231 | OBFC1 | 0.37 | TGGACCCCACTGGCTGAGAATCTGG |
| 232 | EPB41L4B | 0.32 | GCCCCACTGGACAACACTGATTCCT |
| 233 | CALML4 | 0.31 | TCCTCCATCACCTGAAACACTGGAC |

TABLE 34
Dexamethasone biomarkers.

| | | | |
|---|---|---|---|
| SEQ | | | |
| ID | | Corre- | |
| NO | Gene | lation | Medianprobe |

| | | | |
|---|---|---|---|
| 234 | IFITM2 | 0.38 | ATATATGGACCTAGCTTGAGGCAAT |
| 235 | UBE2L6 | 0.32 | AAGCCTATACGTTTCTGTGGAGTAA |
| 236 | ITM2A | 0.38 | CACCCAGCTGGTCCTGTGGATGGGA |
| 237 | IL2RG | 0.36 | TCCTCCATCACCTGAAACACTGGAC |
| 238 | GPRASP1 | 0.36 | TCCTGTACTTGTCCTCAGCTTGGGC |
| 239 | PTPN7 | 0.31 | TCCTTGTGCCTGCTCCTGTACTTGT |
| 240 | CXorf9 | 0.36 | GCCCCACTGGACAACACTGATTCCT |
| 241 | RHOH | 0.33 | TGCCTGCTCCTGTACTTGTCCTCAG |
| 242 | GIT2 | 0.31 | ACTTGTCCTCAGCTTGGGCTTCTTC |
| 243 | ZNFN1A1 | 0.35 | TCCTTGTGCCTGCTCCTGTACTTGT |
| 244 | CEP1 | 0.31 | CACCCAGCTGGTCCTGTGGATGGGA |
| 245 | MAP4K1 | 0.3 | AAGCCTATACGTTTCTGTGGAGTAA |
| 246 | CCR7 | 0.33 | AAATGTTTCCTTGTGCCTGCTCCTG |
| 247 | CD3G | 0.35 | CACCCAGCTGGTCCTGTGGATGGGA |
| 248 | UCP2 | 0.3 | AAGCCTATACGTTTCTGTGGAGTAA |
| 249 | GATA3 | 0.37 | TGGACCCCACTGGCTGAGAATCTGG |
| 250 | CDKN2A | 0.32 | TCCTGTACTTGTCCTCAGCTTGGGC |
| 251 | TARP | 0.3 | GCCCCACTGGACAACACTGATTCCT |
| 252 | LAIR1 | 0.34 | TTGGACATCTCTAGTGTAGCTGCCA |
| 253 | SH2D1A | 0.34 | TCCTTGTGCCTGCTCCTGTACTTGT |
| 254 | SEPT6 | 0.34 | TGCCTGCTCCTGTACTTGTCCTCAG |
| 255 | HA-1 | 0.34 | TCCTTGTGCCTGCTCCTGTACTTGT |
| 256 | CD3D | 0.32 | TCCTCCATCACCTGAAACACTGGAC |
| 257 | LST1 | 0.39 | CACCCAGCTGGTCCTGTGGATGGGA |
| 258 | AIF1 | 0.35 | AAGCCTATACGTTTCTGTGGAGTAA |
| 259 | ADA | 0.33 | TGCCTGCTCCTGTACTTGTCCTCAG |
| 260 | DATF1 | 0.41 | CACCCAGCTGGTCCTGTGGATGGGA |
| 261 | ARHGAP15 | 0.3 | TCCTGTACTTGTCCTCAGCTTGGGC |
| 262 | PLAC8 | 0.31 | CACCCAGCTGGTCCTGTGGATGGGA |
| 263 | CECR1 | 0.31 | GCCCCACTGGACAACACTGATTCCT |
| 264 | LOC81558 | 0.33 | TGGACCCCACTGGCTGAGAATCTGG |
| 265 | EHD2 | 0.37 | ACTTGTCCTCAGCTTGGGCTTCTTC |

TABLE 35
Ara-C (Cytarabine hydrochloride) biomarkers.

| | | | |
|---|---|---|---|
| SEQ | | | |
| ID | | Corre- | |
| NO | Gene | lation | Medianprobe |

| | | | |
|---|---|---|---|
| 266 | ITM2A | 0.32 | TGGACCCCACTGGCTGAGAATCTGG |
| 267 | RHOH | 0.31 | AAATGTTTCCTTGTGCCTGCTCCTG |
| 268 | PRIM1 | 0.3 | TCCTCCATCACCTGAAACACTGGAC |
| 269 | CENTB1 | 0.31 | TCCTTGTGCCTGCTCCTGTACTTGT |
| 270 | NAP1L1 | 0.31 | GCCCCACTGGACAACACTGATTCCT |
| 271 | ATP5G2 | 0.31 | TCCTCCATCACCTGAAACACTGGAC |
| 272 | GATA3 | 0.33 | AAATGTTTCCTTGTGCCTGCTCCTG |
| 273 | PRKCQ | 0.32 | AAGCCTATACGTTTCTGTGGAGTAA |
| 274 | SH2D1A | 0.3 | GCCCCACTGGACAACACTGATTCCT |
| 275 | SEPT6 | 0.42 | ACTTGTCCTCAGCTTGGGCTTCTTC |
| 276 | NME4 | 0.33 | ACTTGTCCTCAGCTTGGGCTTCTTC |
| 277 | CD3D | 0.31 | AAGCCTATACGTTTCTGTGGAGTAA |
| 278 | CD1E | 0.32 | TGGACCCCACTGGCTGAGAATCTGG |
| 279 | ADA | 0.34 | GCCCCACTGGACAACACTGATTCCT |
| 280 | FHOD1 | 0.31 | CACCCAGCTGGTCCTGTGGATGGGA |

TABLE 36
Methylprednisolone biomarkers.

| | | | |
|---|---|---|---|
| SEQ | | | |
| ID | | Corre- | |
| NO | Gene | lation | Medianprobe |

| | | | |
|---|---|---|---|
| 281 | CD99 | 0.31 | GCCCCACTGGACAACACTGATTCCT |
| 282 | ARHGDIB | 0.31 | TGCCTGCTCCTGTACTTGTCCTCAG |
| 283 | ITM2A | 0.35 | GCCCCACTGGACAACACTGATTCCT |
| 284 | LGALS9 | 0.43 | TCCTCCATCACCTGAAACACTGGAC |
| 285 | INPP5D | 0.34 | TGGACCCCACTGGCTGAGAATCTGG |
| 286 | SATB1 | 0.32 | TCCTTGTGCCTGCTCCTGTACTTGT |
| 287 | TFDP2 | 0.4 | AAATGTTTCCTTGTGCCTGCTCCTG |
| 288 | SLA | 0.31 | TGGACCCCACTGGCTGAGAATCTGG |
| 289 | IL2RG | 0.3 | TGCCTGCTCCTGTACTTGTCCTCAG |
| 290 | MFNG | 0.3 | TGCCTGCTCCTGTACTTGTCCTCAG |
| 291 | SELL | 0.33 | AAATGTTTCCTTGTGCCTGCTCCTG |
| 292 | CDW52 | 0.33 | TCCTCCATCACCTGAAACACTGGAC |
| 293 | LRMP | 0.32 | TCCTGTACTTGTCCTCAGCTTGGGC |
| 294 | ICAM2 | 0.38 | CACCCAGCTGGTCCTGTGGATGGGA |
| 295 | RIMS3 | 0.36 | TGCCTGCTCCTGTACTTGTCCTCAG |
| 296 | PTPN7 | 0.39 | TGGACCCCACTGGCTGAGAATCTGG |
| 297 | ARHGAP25 | 0.37 | TCCTGTACTTGTCCTCAGCTTGGGC |
| 298 | LCK | 0.3 | TCCTCCATCACCTGAAACACTGGAC |
| 299 | CXorf9 | 0.3 | TTGGACATCTCTAGTGTAGCTGCCA |
| 300 | RHOH | 0.51 | AAGCCTATACGTTTCTGTGGAGTAA |
| 301 | GIT2 | 0.33 | ACTTGTCCTCAGCTTGGGCTTCTTC |
| 302 | ZNFN1A1 | 0.53 | TCCTTGTGCCTGCTCCTGTACTTGT |
| 303 | CENTB1 | 0.36 | TCCTCCATCACCTGAAACACTGGAC |
| 304 | LCP2 | 0.34 | TCCTGTACTTGTCCTCAGCTTGGGC |
| 305 | SPI1 | 0.3 | TCCTGTACTTGTCCTCAGCTTGGGC |
| 306 | GZMA | 0.31 | AAGCCTATACGTTTCTGTGGAGTAA |
| 307 | CEP1 | 0.37 | AAGCCTATACGTTTCTGTGGAGTAA |
| 308 | CD8A | 0.38 | TGGACCCCACTGGCTGAGAATCTGG |
| 309 | SCAP1 | 0.32 | TCCTCCATCACCTGAAACACTGGAC |
| 310 | CD2 | 0.48 | GCCCCACTGGACAACACTGATTCCT |
| 311 | VAV1 | 0.41 | ACTTGTCCTCAGCTTGGGCTTCTTC |
| 312 | MAP4K1 | 0.36 | TCCTGTACTTGTCCTCAGCTTGGGC |
| 313 | CCR7 | 0.37 | ACTTGTCCTCAGCTTGGGCTTCTTC |
| 314 | C6orf32 | 0.38 | TCCTTGTGCCTGCTCCTGTACTTGT |
| 315 | ALOX15B | 0.43 | TGCCTGCTCCTGTACTTGTCCTCAG |
| 316 | BRDT | 0.33 | AAGCCTATACGTTTCTGTGGAGTAA |
| 317 | CD3G | 0.51 | AAGCCTATACGTTTCTGTGGAGTAA |
| 318 | LTB | 0.32 | ACTTGTCCTCAGCTTGGGCTTCTTC |
| 319 | NVL | 0.31 | TTGGACATCTCTAGTGTAGCTGCCA |
| 320 | RASGRP2 | 0.35 | TGCCTGCTCCTGTACTTGTCCTCAG |
| 321 | LCP1 | 0.34 | AAATGTTTCCTTGTGCCTGCTCCTG |
| 322 | CXCR4 | 0.3 | AAGCCTATACGTTTCTGTGGAGTAA |
| 323 | PRKD2 | 0.33 | CACCCAGCTGGTCCTGTGGATGGGA |
| 324 | GATA3 | 0.39 | TCCTGTACTTGTCCTCAGCTTGGGC |
| 325 | KIAA0922 | 0.36 | GCCCCACTGGACAACACTGATTCCT |
| 326 | TARP | 0.49 | TCCTCCATCACCTGAAACACTGGAC |
| 327 | SEC31L2 | 0.32 | ACTTGTCCTCAGCTTGGGCTTCTTC |
| 328 | PRKCQ | 0.37 | TTGGACATCTCTAGTGTAGCTGCCA |
| 329 | SH2D1A | 0.33 | AAGCCTATACGTTTCTGTGGAGTAA |
| 330 | CHRNA3 | 0.5 | AAGCCTATACGTTTCTGTGGAGTAA |
| 331 | CD1A | 0.44 | AAGCCTATACGTTTCTGTGGAGTAA |
| 332 | LST1 | 0.36 | CACCCAGCTGGTCCTGTGGATGGGA |
| 333 | LAIR1 | 0.47 | CACCCAGCTGGTCCTGTGGATGGGA |
| 334 | CACNA1G | 0.33 | GCCCCACTGGACAACACTGATTCCT |
| 335 | TRB@ | 0.31 | ACTTGTCCTCAGCTTGGGCTTCTTC |
| 336 | SEPT6 | 0.33 | TCCTTGTGCCTGCTCCTGTACTTGT |
| 337 | HA-1 | 0.42 | CACCCAGCTGGTCCTGTGGATGGGA |
| 338 | DOCK2 | 0.32 | TCCTGTACTTGTCCTCAGCTTGGGC |
| 339 | CD3D | 0.41 | TCCTGTACTTGTCCTCAGCTTGGGC |
| 340 | TRD@ | 0.38 | TGCCTGCTCCTGTACTTGTCCTCAG |
| 341 | T3JAM | 0.37 | TGCCTGCTCCTGTACTTGTCCTCAG |
| 342 | FNBP1 | 0.37 | TCCTGTACTTGTCCTCAGCTTGGGC |
| 343 | CD6 | 0.4 | CACCCAGCTGGTCCTGTGGATGGGA |
| 344 | AIF1 | 0.31 | TGCCTGCTCCTGTACTTGTCCTCAG |
| 345 | FOLH1 | 0.45 | TCCTGTACTTGTCCTCAGCTTGGGC |
| 346 | CD1E | 0.58 | CACCCAGCTGGTCCTGTGGATGGGA |
| 347 | LY9 | 0.39 | TCCTTGTGCCTGCTCCTGTACTTGT |
| 348 | ADA | 0.39 | AAATGTTTCCTTGTGCCTGCTCCTG |
| 349 | CDKL5 | 0.44 | GCCCCACTGGACAACACTGATTCCT |
| 350 | TRIM | 0.38 | AAGCCTATACGTTTCTGTGGAGTAA |
| 351 | DATF1 | 0.31 | ACTTGTCCTCAGCTTGGGCTTCTTC |
| 352 | RGC32 | 0.51 | TCCTTGTGCCTGCTCCTGTACTTGT |
| 353 | ARHGAP15 | 0.34 | CACCCAGCTGGTCCTGTGGATGGGA |
| 354 | NOTCH1 | 0.36 | TCCTTGTGCCTGCTCCTGTACTTGT |
| 355 | BIN2 | 0.31 | AAATGTTTCCTTGTGCCTGCTCCTG |
| 356 | SEMA4G | 0.35 | AAGCCTATACGTTTCTGTGGAGTAA |
| 357 | DPEP2 | 0.33 | CACCCAGCTGGTCCTGTGGATGGGA |
| 358 | CECR1 | 0.36 | TCCTGTACTTGTCCTCAGCTTGGGC |
| 359 | BCL11B | 0.33 | TGCCTGCTCCTGTACTTGTCCTCAG |
| 360 | STAG3 | 0.41 | TTGGACATCTCTAGTGTAGCTGCCA |
| 361 | GALNT6 | 0.32 | TGCCTGCTCCTGTACTTGTCCTCAG |
| 362 | UBASH3A | 0.3 | AAATGTTTCCTTGTGCCTGCTCCTG |
| 363 | PHEMX | 0.38 | TCCTCCATCACCTGAAACACTGGAC |
| 364 | FLJ13373 | 0.34 | TCCTTGTGCCTGCTCCTGTACTTGT |
| 365 | LEF1 | 0.49 | TCCTCCATCACCTGAAACACTGGAC |
| 366 | IL21R | 0.42 | TTGGACATCTCTAGTGTAGCTGCCA |
| 367 | MGC17330 | 0.33 | TCCTTGTGCCTGCTCCTGTACTTGT |
| 368 | AKAP13 | 0.53 | TCCTTGTGCCTGCTCCTGTACTTGT |
| 369 | GIMAP5 | 0.34 | AAATGTTTCCTTGTGCCTGCTCCTG |

TABLE 37
Methotrexate biomarkers.

| | | | |
|---|---|---|---|
| SEQ | | | |
| ID | | Corre- | |
| NO | Gene | lation | Medianprobe |

| | | | |
|---|---|---|---|
| 370 | PRPF8 | 0.34 | TCCTCCATCACCTGAAACACTGGAC |
| 371 | RPL18 | 0.34 | AAGCCTATACGTTTCTGTGGAGTAA |
| 372 | GOT2 | 0.31 | CACCCAGCTGGTCCTGTGGATGGGA |
| 373 | RPL13A | 0.31 | TCCTGTACTTGTCCTCAGCTTGGGC |
| 374 | RPS15 | 0.39 | CACCCAGCTGGTCCTGTGGATGGGA |
| 375 | RPLP2 | 0.32 | GCCCCACTGGACAACACTGATTCCT |
| 376 | CSDA | 0.39 | GCCCCACTGGACAACACTGATTCCT |
| 377 | KHDRBS1 | 0.32 | TCCTCCATCACCTGAAACACTGGAC |
| 378 | SNRPA | 0.31 | TCCTGTACTTGTCCTCAGCTTGGGC |
| 379 | IMPDH2 | 0.39 | AAATGTTTCCTTGTGCCTGCTCCTG |
| 380 | RPS19 | 0.47 | AAATGTTTCCTTGTGCCTGCTCCTG |
| 381 | NUP88 | 0.36 | CACCCAGCTGGTCCTGTGGATGGGA |
| 382 | ATP5D | 0.33 | TGCCTGCTCCTGTACTTGTCCTCAG |
| 383 | PCBP2 | 0.32 | AAATGTTTCCTTGTGCCTGCTCCTG |
| 384 | ZNF593 | 0.4 | AAATGTTTCCTTGTGCCTGCTCCTG |
| 385 | HSU79274 | 0.32 | TGGACCCCACTGGCTGAGAATCTGG |
| 386 | PRIM1 | 0.3 | CACCCAGCTGGTCCTGTGGATGGGA |
| 387 | PFDN5 | 0.33 | TCCTCCATCACCTGAAACACTGGAC |
| 388 | OXA1L | 0.37 | CACCCAGCTGGTCCTGTGGATGGGA |
| 389 | ATIC | 0.31 | ACTTGTCCTCAGCTTGGGCTTCTTC |
| 390 | CIAPIN1 | 0.34 | ACTTGTCCTCAGCTTGGGCTTCTTC |
| 391 | RPS2 | 0.32 | CACCCAGCTGGTCCTGTGGATGGGA |
| 392 | PCCB | 0.36 | GCCCCACTGGACAACACTGATTCCT |
| 393 | SHMT2 | 0.34 | ACTTGTCCTCAGCTTGGGCTTCTTC |
| 394 | RPLP0 | 0.35 | AAGCCTATACGTTTCTGTGGAGTAA |
| 395 | HNRPA1 | 0.35 | TGGACCCCACTGGCTGAGAATCTGG |
| 396 | STOML2 | 0.32 | TGCCTGCTCCTGTACTTGTCCTCAG |
| 397 | SKB1 | 0.33 | ACTTGTCCTCAGCTTGGGCTTCTTC |
| 398 | GLTSCR2 | 0.37 | AAGCCTATACGTTTCTGTGGAGTAA |
| 399 | CCNB1IP1 | 0.3 | TCCTTGTGCCTGCTCCTGTACTTGT |
| 400 | MRPS2 | 0.33 | TTGGACATCTCTAGTGTAGCTGCCA |
| 401 | FLJ20859 | 0.34 | TGCCTGCTCCTGTACTTGTCCTCAG |
| 402 | FLJ12270 | 0.3 | ACTTGTCCTCAGCTTGGGCTTCTTC |

TABLE 38
Bleomycin biomarkers.

| | | | |
|---|---|---|---|
| SEQ | | | |
| ID | | Corre- | |
| NO | Gene | lation | Medianprobe |

| | | | |
|---|---|---|---|
| 403 | PFN1 | 0.45 | GCCCCACTGGACAACACTGATTCCT |
| 404 | HK1 | 0.33 | TTGGACATCTCTAGTGTAGCTGCCA |
| 405 | MCL1 | 0.31 | TGGACCCCACTGGCTGAGAATCTGG |
| 406 | ZYX | 0.32 | TGGACCCCACTGGCTGAGAATCTGG |
| 407 | RAP1B | 0.34 | ACTTGTCCTCAGCTTGGGCTTCTTC |
| 408 | GNB2 | 0.32 | CACCCAGCTGGTCCTGTGGATGGGA |
| 409 | EPAS1 | 0.31 | ACTTGTCCTCAGCTTGGGCTTCTTC |
| 410 | PGAM1 | 0.42 | TGCCTGCTCCTGTACTTGTCCTCAG |
| 411 | CKAP4 | 0.31 | ACTTGTCCTCAGCTTGGGCTTCTTC |
| 412 | DUSP1 | 0.4 | AAATGTTTCCTTGTGCCTGCTCCTG |
| 413 | MYL9 | 0.4 | TTGGACATCTCTAGTGTAGCTGCCA |
| 414 | K-ALPHA-1 | 0.37 | TTGGACATCTCTAGTGTAGCTGCCA |
| 415 | CSDA | 0.3 | TCCTTGTGCCTGCTCCTGTACTTGT |
| 416 | IFITM2 | 0.36 | TTGGACATCTCTAGTGTAGCTGCCA |
| 417 | ITGA5 | 0.43 | GCCCCACTGGACAACACTGATTCCT |
| 418 | DPYSL3 | 0.44 | TGGACCCCACTGGCTGAGAATCTGG |
| 419 | JUNB | 0.32 | TCCTGTACTTGTCCTCAGCTTGGGC |
| 420 | NFKBIA | 0.32 | TCCTCCATCACCTGAAACACTGGAC |
| 421 | LAMB1 | 0.37 | AAATGTTTCCTTGTGCCTGCTCCTG |
| 422 | FHL1 | 0.31 | TGGACCCCACTGGCTGAGAATCTGG |
| 423 | INSIG1 | 0.31 | TGGACCCCACTGGCTGAGAATCTGG |
| 424 | TIMP1 | 0.48 | TGGACCCCACTGGCTGAGAATCTGG |
| 425 | GJA1 | 0.54 | AAGCCTATACGTTTCTGTGGAGTAA |
| 426 | PRG1 | 0.46 | TCCTTGTGCCTGCTCCTGTACTTGT |
| 427 | EXT1 | 0.35 | TCCTTGTGCCTGCTCCTGTACTTGT |
| 428 | DKFZP434J154 | 0.31 | GCCCCACTGGACAACACTGATTCCT |
| 429 | MVP | 0.34 | CACCCAGCTGGTCCTGTGGATGGGA |
| 430 | VASP | 0.31 | TCCTCCATCACCTGAAACACTGGAC |
| 431 | ARL7 | 0.39 | TGGACCCCACTGGCTGAGAATCTGG |
| 432 | NNMT | 0.34 | TCCTGTACTTGTCCTCAGCTTGGGC |
| 433 | TAP1 | 0.3 | TCCTGTACTTGTCCTCAGCTTGGGC |
| 434 | PLOD2 | 0.37 | GCCCCACTGGACAACACTGATTCCT |
| 435 | ATF3 | 0.42 | CACCCAGCTGGTCCTGTGGATGGGA |
| 436 | PALM2-AKAP2 | 0.33 | TGGACCCCACTGGCTGAGAATCTGG |
| 437 | IL8 | 0.34 | GCCCCACTGGACAACACTGATTCCT |
| 438 | LOXL2 | 0.32 | GCCCCACTGGACAACACTGATTCCT |
| 439 | IL4R | 0.31 | ACTTGTCCTCAGCTTGGGCTTCTTC |
| 440 | DGKA | 0.32 | GCCCCACTGGACAACACTGATTCCT |
| 441 | SEC61G | 0.41 | CACCCAGCTGGTCCTGTGGATGGGA |
| 442 | RGS3 | 0.37 | TGGACCCCACTGGCTGAGAATCTGG |
| 443 | F2R | 0.34 | CACCCAGCTGGTCCTGTGGATGGGA |
| 444 | TPM2 | 0.35 | CACCCAGCTGGTCCTGTGGATGGGA |
| 445 | PSMB9 | 0.34 | CACCCAGCTGGTCCTGTGGATGGGA |
| 446 | LOX | 0.37 | TCCTGTACTTGTCCTCAGCTTGGGC |
| 447 | STC1 | 0.35 | TCCTCCATCACCTGAAACACTGGAC |
| 448 | PTGER4 | 0.31 | CACCCAGCTGGTCCTGTGGATGGGA |
| 449 | SMAD3 | 0.38 | TTGGACATCTCTAGTGTAGCTGCCA |
| 450 | WNT5A | 0.44 | TGGACCCCAGTGGCTGAGAATCTGG |
| 451 | BDNF | 0.34 | TCCTCCATCACCTGAAACACTGGAC |
| 452 | TNFRSF1A | 0.46 | TCCTCCATCACCTGAAACACTGGAC |
| 453 | FLNC | 0.34 | ACTTGTCCTCAGCTTGGGCTTCTTC |
| 454 | DKFZP564K0822 | 0.34 | TTGGACATCTCTAGTGTAGCTGCCA |
| 455 | FLOT1 | 0.38 | TTGGACATCTCTAGTGTAGCTGCCA |
| 456 | PTRF | 0.39 | TGGACCCCACTGGCTGAGAATCTGG |
| 457 | HLA-B | 0.36 | TTGGACATCTCTAGTGTAGCTGCCA |
| 458 | MGC4083 | 0.32 | GCCCCACTGGACAACACTGATTCCT |
| 459 | TNFRSF10B | 0.34 | TGCCTGCTCCTGTACTTGTCCTCAG |
| 460 | PLAGL1 | 0.31 | TGCCTGCTCCTGTACTTGTCCTCAG |
| 461 | PNMA2 | 0.38 | GCCCCACTGGACAACACTGATTCCT |
| 462 | TFPI | 0.38 | TCCTGTACTTGTCCTCAGCTTGGGC |
| 463 | GZMB | 0.51 | TCCTCCATCACCTGAAACACTGGAC |
| 464 | PLAUR | 0.35 | AAGCCTATACGTTTCTGTGGAGTAA |
| 465 | FSCN1 | 0.32 | ACTTGTCCTCAGCTTGGGCTTCTTC |
| 466 | ERP70 | 0.32 | ACTTGTCCTCAGCTTGGGCTTCTTC |
| 467 | AF1Q | 0.3 | TTGGACATCTCTAGTGTAGCTGCCA |
| 468 | HIC | 0.33 | TGCCTGCTCCTGTACTTGTCCTCAG |
| 469 | COL6A1 | 0.32 | AAGCCTATACGTTTCTGTGGAGTAA |
| 470 | IFITM3 | 0.3 | GCCCCACTGGACAACACTGATTCCT |
| 471 | MAP1B | 0.38 | CACCCAGCTGGTCCTGTGGATGGGA |
| 472 | FLJ46603 | 0.37 | TCCTCCATCACCTGAAACACTGGAC |
| 473 | RAFTLIN | 0.34 | TGGACCCCACTGGCTGAGAATCTGG |
| 474 | RRAS | 0.31 | TCCTGTACTTGTCCTCAGCTTGGGC |
| 475 | FTL | 0.3 | CACCCAGCTGGTCCTGTGGATGGGA |
| 476 | KIAA0877 | 0.31 | CACCCAGCTGGTCCTGTGGATGGGA |
| 477 | MT1E | 0.31 | TCCTTGTGCCTGCTCCTGTACTTGT |
| 478 | CDC10 | 0.51 | AAATGTTTCCTTGTGCCTGCTCCTG |
| 479 | DOCK2 | 0.32 | AAGCCTATACGTTTCTGTGGAGTAA |
| 480 | RIS1 | 0.37 | ACTTGTCCTCAGCTTGGGCTTCTTC |
| 481 | BCAT1 | 0.42 | TTGGACATCTCTAGTGTAGCTGCCA |
| 482 | PRF1 | 0.34 | TCCTCCATCACCTGAAACACTGGAC |
| 483 | DBN1 | 0.36 | GCCCCACTGGACAACACTGATTCCT |
| 484 | MT1K | 0.3 | TGCCTGCTCCTGTACTTGTCCTCAG |
| 485 | TMSB10 | 0.42 | GCCCCACTGGACAACACTGATTCCT |
| 486 | FLJ10350 | 0.4 | AAATGTTTCCTTGTGCCTGCTCCTG |
| 487 | C1orf24 | 0.34 | TGCCTGCTCCTGTACTTGTCCTCAG |
| 488 | NME7 | 0.46 | TCCTGTACTTGTCCTCAGCTTGGGC |
| 489 | TMEM22 | 0.3 | TGCCTGCTCCTGTACTTGTCCTCAG |
| 490 | TPK1 | 0.37 | TCCTCCATCACCTGAAACACTGGAC |
| 491 | ELK3 | 0.38 | TGCCTGCTCCTGTACTTGTCCTCAG |
| 492 | CYLD | 0.4 | TCCTTGTGCCTGCTCCTGTACTTGT |
| 493 | ADAMTS1 | 0.31 | AAGCCTATACGTTTCTGTGGAGTAA |
| 494 | EHD2 | 0.41 | TCCTCCATCACCTGAAACACTGGAC |
| 495 | ACTB | 0.33 | TCCTTGTGCCTGCTCCTGTACTTGT |

TABLE 39

Methyl-GAG (methyl glyoxal bis amidinohydrazone
dihydrochloride) biomarkers.

| | | | |
|---|---|---|---|
| SEQ | | | |
| ID | | Corre- | |
| NO | Gene | lation | Medianprobe |

| | | | |
|---|---|---|---|
| 496 | SSRP1 | 0.37 | TGCCTGCTCCTGTACTTGTCCTCAG |
| 497 | CTSC | 0.35 | CACCCAGCTGGTCCTGTGGATGGGA |
| 498 | LBR | 0.38 | ACTTGTCCTCAGCTTGGGCTTCTTC |
| 499 | EFNB2 | 0.31 | AAATGTTTCCTTGTGCCTGCTCCTG |
| 500 | SERPINA1 | 0.34 | TCCTTGTGCCTGCTCCTGTACTTGT |
| 501 | SSSCA1 | 0.32 | TCCTGTACTTGTCCTCAGCTTGGGC |
| 502 | EZH2 | 0.36 | TTGGACATCTCTAGTGTAGCTGCCA |
| 503 | MYB | 0.33 | GCCCCACTGGACAACACTGATTCCT |
| 504 | PRIM1 | 0.39 | TCCTCCATCACCTGAAACACTGGAC |
| 505 | H2AFX | 0.33 | TCCTTGTGCCTGCTCCTGTACTTGT |
| 506 | HMGA1 | 0.35 | TTGGACATCTCTAGTGTAGCTGCCA |
| 507 | HMMR | 0.33 | TCCTTGTGCCTGCTCCTGTACTTGT |
| 508 | TK2 | 0.42 | CACCCAGCTGGTCCTGTGGATGGGA |
| 509 | WHSC1 | 0.35 | AAATGTTTCCTTGTGCCTGCTCCTG |
| 510 | DIAPH1 | 0.34 | GCCCCACTGGACAACACTGATTCCT |
| 511 | LAMB3 | 0.31 | GCCCCACTGGACAACACTGATTCCT |
| 512 | DPAGT1 | 0.42 | TGCCTGCTCCTGTACTTGTCCTCAG |
| 513 | UCK2 | 0.31 | GCCCCACTGGACAACACTGATTCCT |
| 514 | SERPINB1 | 0.31 | TCCTTGTGCCTGCTCCTGTACTTGT |
| 515 | MDN1 | 0.35 | TGCCTGCTCCTGTACTTGTCCTCAG |
| 516 | G0S2 | 0.43 | CACCCAGCTGGTCCTGTGGATGGGA |
| 517 | MGC21654 | 0.36 | TGGACCCCACTGGCTGAGAATCTGG |
| 518 | GTSE1 | 0.35 | ACTTGTCCTCAGCTTGGGCTTCTTC |
| 519 | TACC3 | 0.31 | TCCTCCATCACCTGAAACACTGGAC |
| 520 | PLAC8 | 0.31 | CACCCAGCTGGTCCTGTGGATGGGA |
| 521 | HNRPD | 0.35 | TTGGACATCTCTAGTGTAGCTGCCA |
| 522 | PNAS-4 | 0.3 | TTGGACATCTCTAGTGTAGCTGCCA |

TABLE 40
HDAC inhibitors biomarkers.

| | | | |
|---|---|---|---|
| SEQ | | | |
| ID | | Corre- | |
| NO | Gene | lation | Medianprobe |

| | | | |
|---|---|---|---|
| 523. | FAU | 0.33 | TTGGACATCTCTAGTGTAGCTGCCA |
| 524 | NOL5A | 0.33 | TGGACCCCACTGGCTGAGAATCTGG |
| 525 | ANP32A | 0.32 | CACCCAGCTGGTCCTGTGGATGGGA |
| 526 | ARHGDIB | 0.3 | ACTTGTCCTCAGCTTGGGCTTCTTC |
| 527 | LBR | 0.31 | ACTTGTCCTCAGCTTGGGCTTCTTC |
| 528 | FABP5 | 0.33 | TCCTCCATCACCTGAAACACTGGAC |
| 529 | ITM2A | 0.32 | TTGGACATCTCTAGTGTAGCTGCCA |
| 530 | SFRS5 | 0.34 | TCCTCCATCACCTGAAACACTGGAC |
| 531 | IQGAP2 | 0.4 | CACCCAGCTGGTCCTGTGGATGGGA |
| 532 | SLC7A6 | 0.35 | AAGCCTATACGTTTCTGTGGAGTAA |
| 533 | SLA | 0.31 | TGCCTGCTCCTGTACTTGTCCTCAG |
| 534 | IL2RG | 0.31 | TCCTCCATCACCTGAAACACTGGAC |
| 535 | MFNG | 0.39 | TCCTGTACTTGTCCTCAGCTTGGGC |
| 536 | GPSM3 | 0.32 | TTGGACATCTCTAGTGTAGCTGCCA |
| 537 | PIM2 | 0.3 | TTGGACATCTCTAGTGTAGCTGCCA |
| 538 | EVER1 | 0.35 | GCCCCACTGGACAACACTGATTCCT |
| 539 | LRMP | 0.35 | TGCCTGCTCCTGTACTTGTCCTCAG |
| 540 | ICAM2 | 0.44 | TCCTGTACTTGTCCTCAGCTTGGGC |
| 541 | RIMS3 | 0.43 | TGGACCCCACTGGCTGAGAATCTGG |
| 542 | FMNL1 | 0.35 | TTGGACATCTCTAGTGTAGCTGCCA |
| 543 | MYB | 0.37 | TGCCTGCTCCTGTACTTGTCCTCAG |
| 544 | PTPN7 | 0.36 | TCCTTGTGCCTGCTCCTGTACTTGT |
| 545 | LCK | 0.48 | CACCCAGCTGGTCCTGTGGATGGGA |
| 546 | CXorf9 | 0.3 | ACTTGTCCTCAGCTTGGGCTTCTTC |
| 547 | RHOH | 0.31 | TCCTTGTGCCTGCTCCTGTACTTGT |
| 548 | ZNFN1A1 | 0.33 | AAATGTTTCCTTGTGCCTGCTCCTG |
| 549 | CENTB1 | 0.45 | CACCCAGCTGGTCCTGTGGATGGGA |
| 550 | LCP2 | 0.31 | TGCCTGCTCCTGTACTTGTCCTCAG |
| 551 | DBT | 0.32 | TCCTGTACTTGTCCTCAGCTTGGGC |
| 552 | CEP1 | 0.31 | TTGGACATCTCTAGTGTAGCTGCCA |
| 553 | IL6R | 0.31 | TGGACCCCACTGGCTGAGAATCTGG |
| 554 | VAV1 | 0.32 | TCCTTGTGCCTGCTCCTGTACTTGT |
| 555 | MAP4K1 | 0.3 | AAGCCTATACGTTTCTGTGGAGTAA |
| 556 | CD28 | 0.36 | TCCTTGTGCCTGCTCCTGTACTTGT |
| 557 | PTP4A3 | 0.3 | TTGGACATCTCTAGTGTAGCTGCCA |
| 558 | CD3G | 0.33 | CACCCAGCTGGTCCTGTGGATGGGA |
| 559 | LTB | 0.4 | TCCTGTACTTGTCCTCAGCTTGGGC |
| 560 | USP34 | 0.44 | GCCCCACTGGACAACACTGATTCCT |
| 561 | NVL | 0.41 | TCCTTGTGCCTGCTCCTGTACTTGT |
| 562 | CD8B1 | 0.33 | ACTTGTCCTCAGCTTGGGCTTCTTC |
| 563 | SFRS6 | 0.31 | GCCCCACTGGACAACACTGATTCCT |
| 564 | LCP1 | 0.34 | TCCTGTACTTGTCCTCAGCTTGGGC |
| 565 | CXCR4 | 0.36 | TGCCTGCTCCTGTACTTGTCCTCAG |
| 566 | PSCDBP | 0.33 | TGGACCCCACTGGCTGAGAATCTGG |
| 567 | SELPLG | 0.33 | TTGGACATCTCTAGTGTAGCTGCCA |
| 568 | CD3Z | 0.3 | TCCTTGTGCCTGCTCCTGTACTTGT |
| 569 | PRKCQ | 0.33 | TTGGACATCTCTAGTGTAGCTGCCA |
| 570 | CD1A | 0.34 | GCCCCACTGGACAACACTGATTCCT |
| 571 | GATA2 | 0.31 | TTGGACATCTCTAGTGTAGCTGCCA |
| 572 | P2RX5 | 0.32 | TGCCTGCTCCTGTACTTGTCCTCAG |
| 573 | LAIR1 | 0.35 | TGGACCCCACTGGCTGAGAATCTGG |
| 574 | C1orf38 | 0.4 | GCCCCACTGGACAACACTGATTCCT |
| 575 | SH2D1A | 0.44 | TCCTTGTGCCTGCTCCTGTACTTGT |
| 576 | TRB@ | 0.33 | CACCCAGCTGGTCCTGTGGATGGGA |
| 577 | SEPT6 | 0.34 | GCCCCACTGGACAACACTGATTCCT |
| 578 | HA-1 | 0.32 | AAGCCTATACGTTTCTGTGGAGTAA |
| 579 | DOCK2 | 0.3 | TCCTTGTGCCTGCTCCTGTACTTGT |
| 580 | WBSCR20C | 0.31 | TGCCTGCTCCTGTACTTGTCCTCAG |
| 581 | CD3D | 0.3 | ACTTGTCCTCAGCTTGGGCTTCTTC |
| 582 | RNASE6 | 0.31 | GCCCCACTGGACAACACTGATTCCT |
| 583 | SFRS7 | 0.32 | AAATGTTTCCTTGTGCCTGCTCCTG |
| 584 | WBSCR20A | 0.3 | AAGCCTATACGTTTCTGTGGAGTAA |
| 585 | NUP210 | 0.31 | TTGGACATCTCTAGTGTAGCTGCCA |
| 586 | CD6 | 0.34 | TCCTTGTGCCTGCTCCTGTACTTGT |
| 587 | HNRPA1 | 0.3 | GCCCCACTGGACAACACTGATTCCT |
| 588 | AIF1 | 0.34 | AAGCCTATACGTTTCTGTGGAGTAA |
| 589 | CYFIP2 | 0.38 | TGGACCCCACTGGCTGAGAATCTGG |
| 590 | GLTSCR2 | 0.38 | TCCTTGTGCCTGCTCCTGTACTTGT |
| 591 | C11orf2 | 0.31 | AAGCCTATACGTTTCTGTGGAGTAA |
| 592 | ARHGAP15 | 0.33 | TGGACCCCACTGGCTGAGAATCTGG |
| 593 | BIN2 | 0.35 | TTGGACATCTCTAGTGTAGCTGCCA |
| 594 | SH3TC1 | 0.35 | ACTTGTCCTCAGCTTGGGCTTCTTC |
| 595 | STAG3 | 0.32 | AAATGTTTCCTTGTGCCTGCTCCTG |
| 596 | TM6SF1 | 0.34 | ACTTGTCCTCAGCTTGGGCTTCTTC |
| 597 | C15orf25 | 0.33 | TCCTCCATCACCTGAAACACTGGAC |
| 598 | FLJ22457 | 0.36 | AAATGTTTCCTTGTGCCTGCTCCTG |
| 599 | PACAP | 0.34 | TGCCTGCTCCTGTACTTGTCCTCAG |
| 600 | MGC2744 | 0.31 | GCCCCACTGGACAACACTGATTCCT |

TABLE 41
5-Fluorouracil biomarkers.

| | | | |
|---|---|---|---|
| SEQ | | | |
| ID | | Corre- | |
| NO | Gene | lation | Medianprobe |

| | | | |
|---|---|---|---|
| 601 | RPL18 | 0.38 | AAATGTTTCCTTGTGCCTGCTCCTG |
| 602 | RPL10A | 0.39 | TGGACCCCACTGGCTGAGAATCTGG |
| 603 | ANAPC5 | 0.37 | ACTTGTCCTCAGCTTGGGCTTCTTC |
| 604 | EEF1B2 | 0.3 | TCCTGTACTTGTCCTCAGCTTGGGC |
| 605 | RPL13A | 0.5 | TGCCTGCTCCTGTACTTGTCCTCAG |
| 606 | RPS15 | 0.4 | ACTTGTCCTCAGCTTGGGCTTCTTC |
| 607 | NDUFAB1 | 0.38 | GCCCCACTGGACAACACTGATTCCT |
| 608 | APRT | 0.32 | AAATGTTTCCTTGTGCCTGCTCCTG |
| 609 | ZNF593 | 0.34 | TCCTCCATCACCTGAAACACTGGAC |
| 610 | MRP63 | 0.32 | AAATGTTTCCTTGTGCCTGCTCCTG |
| 611 | IL6R | 0.41 | TGGACCCCACTGGCTGAGAATCTGG |
| 612 | SART3 | 0.37 | TCCTCCATCACCTGAAACACTGGAC |
| 613 | UCK2 | 0.32 | GCCCCACTGGACAACACTGATTCCT |
| 614 | RPL17 | 0.31 | AAGCCTATACGTTTCTGTGGAGTAA |
| 615 | RPS2 | 0.35 | CACCCAGCTGGTCCTGTGGATGGGA |
| 616 | PCCB | 0.38 | TCCTTGTGCCTGCTCCTGTACTTGT |
| 617 | TOMM20 | 0.32 | TGGACCCCACTGGCTGAGAATCTGG |
| 618 | SHMT2 | 0.32 | TTGGACATCTCTAGTGTAGCTGCCA |
| 619 | RPLP0 | 0.31 | TCCTTGTGCCTGCTCCTGTACTTGT |
| 620 | GTF3A | 0.32 | CACCCAGCTGGTCCTGTGGATGGGA |
| 621 | STOML2 | 0.33 | TGGACCCCACTGGCTGAGAATCTGG |
| 622 | DKFZp564J157 | 0.4 | AAATGTTTCCTTGTGCCTGCTCCTG |
| 623 | MRPS2 | 0.32 | TCCTGTACTTGTCCTCAGCTTGGGC |
| 624 | ALG5 | 0.3 | TTGGACATCTCTAGTGTAGCTGCCA |
| 625 | CALML4 | 0.33 | CACCCAGCTGGTCCTGTGGATGGGA |

TABLE 42
Radiation sensitivity biomarkers.

| | | | |
|---|---|---|---|
| SEQ | | | |
| ID | | Corre- | |
| NO | Gene | lation | Medianprobe |

| | | | |
|---|---|---|---|
| 626 | TRA1 | 0.36 | TGGACCCCACTGGCTGAGAATCTGG |
| 627 | ACTN4 | 0.36 | ACTTGTCCTCAGCTTGGGCTTCTTC |
| 628 | CALM1 | 0.32 | TCCTCCATCACCTGAAACACTGGAC |
| 629 | CD63 | 0.32 | TCCTGTACTTGTCCTCAGCTTGGGC |
| 630 | FKBP1A | 0.38 | TGGACCCCACTGGCTGAGAATCTGG |
| 631 | CALU | 0.47 | ACTTGTCCTCAGCTTGGGCTTCTTC |
| 632 | IQGAP1 | 0.37 | TTGGACATCTCTAGTGTAGCTGCCA |
| 633 | MGC8721 | 0.35 | AAATGTTTCCTTGTGCCTGCTCCTG |
| 634 | STAT1 | 0.37 | TGGACCCCACTGGCTGAGAATCTGG |
| 635 | TACC1 | 0.41 | ACTTGTCCTCAGCTTGGGCTTCTTC |
| 636 | TM4SF8 | 0.33 | AAGCCTATACGTTTCTGTGGAGTAA |
| 637 | CD59 | 0.31 | TCCTCCATCACCTGAAACACTGGAC |
| 638 | CKAP4 | 0.45 | TCCTTGTGCCTGCTCCTGTACTTGT |
| 639 | DUSP1 | 0.38 | TCCTGTACTTGTCCTCAGCTTGGGC |
| 640 | RCN1 | 0.31 | TGCCTGCTCCTGTACTTGTCCTCAG |
| 641 | MGC8902 | 0.35 | TGCCTGCTCCTGTACTTGTCCTCAG |
| 642 | RRBP1 | 0.31 | ACTTGTCCTCAGCTTGGGCTTCTTC |
| 643 | PRNP | 0.42 | TTGGACATCTCTAGTGTAGCTGCCA |
| 644 | IER3 | 0.34 | GCCCCACTGGACAACACTGATTCCT |
| 645 | MARCKS | 0.43 | GCCCCACTGGACAACACTGATTCCT |
| 646 | FER1L3 | 0.47 | TGCCTGCTCCTGTACTTGTCCTCAG |
| 647 | SLC20A1 | 0.41 | ACTTGTCCTCAGCTTGGGCTTCTTC |
| 648 | HEXB | 0.46 | AAATGTTTCCTTGTGCCTGCTCCTG |
| 649 | EXT1 | 0.47 | CACCCAGCTGGTCCTGTGGATGGGA |
| 650 | TJP1 | 0.32 | AAATGTTTCCTTGTGCCTGCTCCTG |
| 651 | CTSL | 0.38 | TCCTGTACTTGTCCTCAGCTTGGGC |
| 652 | SLC39A6 | 0.36 | TCCTGTACTTGTCCTCAGCTTGGGC |
| 653 | RIOK3 | 0.38 | TCCTCCATCACCTGAAACACTGGAC |
| 654 | CRK | 0.37 | TGCCTGCTCCTGTACTTGTCCTCAG |
| 655 | NNMT | 0.37 | TGCCTGCTCCTGTACTTGTCCTCAG |
| 656 | TRAM2 | 0.35 | TTGGACATCTCTAGTGTAGCTGCCA |
| 657 | ADAM9 | 0.52 | TCCTGTACTTGTCCTCAGCTTGGGC |
| 658 | PLSCR1 | 0.35 | TGGACCCCACTGGCTGAGAATCTGG |
| 659 | PRSS23 | 0.3 | TGCCTGCTCCTGTACTTGTCCTCAG |
| 660 | PLOD2 | 0.36 | TGCCTGCTCCTGTACTTGTCCTCAG |
| 661 | NPC1 | 0.39 | TGCCTGCTCCTGTACTTGTCCTCAG |
| 662 | TOB1 | 0.37 | CACCCAGCTGGTCCTGTGGATGGGA |
| 663 | GFPT1 | 0.47 | CACCCAGCTGGTCCTGTGGATGGGA |
| 664 | IL8 | 0.36 | AAATGTTTCCTTGTGCCTGCTCCTG |
| 665 | PYGL | 0.46 | TCCTCCATCACCTGAAACACTGGAC |
| 666 | LOXL2 | 0.49 | TTGGACATCTCTAGTGTAGCTGCCA |
| 667 | KIAA0355 | 0.36 | TCCTTGTGCCTGCTCCTGTACTTGT |
| 668 | UGDH | 0.49 | TTGGACATCTCTAGTGTAGCTGCCA |
| 669 | PURA | 0.32 | TGCCTGCTCCTGTACTTGTCCTCAG |
| 670 | ULK2 | 0.37 | AAGCCTATACGTTTCTGTGGAGTAA |
| 671 | CENTG2 | 0.35 | GCCCCACTGGACAACACTGATTCCT |
| 672 | CAP350 | 0.31 | GCCCCACTGGACAACACTGATTCCT |
| 673 | CXCL1 | 0.36 | TCCTGTACTTGTCCTCAGCTTGGGC |
| 674 | BTN3A3 | 0.35 | AAGCCTATACGTTTCTGTGGAGTAA |
| 675 | WNT5A | 0.3 | AAGCCTATACGTTTCTGTGGAGTAA |
| 676 | FOXF2 | 0.44 | AAATGTTTCCTTGTGCCTGCTCCTG |
| 677 | LPHN2 | 0.34 | GCCCCACTGGACAACACTGATTCCT |
| 678 | CDH11 | 0.39 | TGGACCCCACTGGCTGAGAATCTGG |
| 679 | P4HA1 | 0.33 | TCCTCCATCACCTGAAACACTGGAC |
| 680 | GRP58 | 0.44 | CACCCAGCTGGTCCTGTGGATGGGA |
| 681 | DSIPI | 0.44 | TGGACCCCACTGGCTGAGAATCTGG |
| 682 | MAP1LC3B | 0.5 | AAGCCTATACGTTTCTGTGGAGTAA |
| 683 | GALIG | 0.36 | AAATGTTTCCTTGTGCCTGCTCCTG |
| 684 | IGSF4 | 0.4 | TCCTCCATCACCTGAAACACTGGAC |
| 685 | IRS2 | 0.35 | TGGACCCCACTGGCTGAGAATCTGG |
| 686 | ATP2A2 | 0.35 | CACCCAGCTGGTCCTGTGGATGGGA |
| 687 | OGT | 0.3 | TCCTGTACTTGTCCTCAGCTTGGGC |
| 688 | TNFRSF10B | 0.31 | AAGCCTATACGTTTCTGTGGAGTAA |
| 689 | KIAA1128 | 0.35 | CACCCAGCTGGTCCTGTGGATGGGA |
| 690 | TM4SF1 | 0.35 | CACCCAGCTGGTCCTGTGGATGGGA |
| 691 | RIPK2 | 0.42 | TGCCTGCTCCTGTACTTGTCCTCAG |
| 692 | NR1D2 | 0.47 | TTGGACATCTCTAGTGTAGCTGCCA |
| 693 | SSA2 | 0.36 | TTGGACATCTCTAGTGTAGCTGCCA |
| 694 | NQO1 | 0.4 | AAGCCTATACGTTTCTGTGGAGTAA |
| 695 | ASPH | 0.36 | TGCCTGCTCCTGTACTTGTCCTCAG |
| 696 | ASAH1 | 0.33 | ACTTGTCCTCAGCTTGGGCTTCTTC |
| 697 | MGLL | 0.35 | TGGACCCCACTGGCTGAGAATCTGG |
| 698 | SERPINB6 | 0.51 | AAGCCTATACGTTTCTGTGGAGTAA |
| 699 | HSPA5 | 0.33 | TCCTTGTGCCTGCTCCTGTACTTGT |
| 700 | ZFP36L1 | 0.39 | TCCTTGTGCCTGCTCCTGTACTTGT |
| 701 | COL4A1 | 0.3 | ACTTGTCCTCAGCTTGGGCTTCTTC |
| 702 | NIPA2 | 0.36 | ACTTGTCCTCAGCTTGGGCTTCTTC |
| 703 | FKBP9 | 0.48 | AAATGTTTCCTTGTGCCTGCTCCTG |
| 704 | IL6ST | 0.4 | GCCCCACTGGACAACACTGATTCCT |
| 705 | DKFZP564G2022 | 0.39 | TTGGACATCTCTAGTGTAGCTGCCA |
| 706 | PPAP2B | 0.33 | TGGACCCCACTGGCTGAGAATCTGG |
| 707 | MAP1B | 0.3 | CACCCAGCTGGTCCTGTGGATGGGA |
| 708 | MAPK1 | 0.3 | TGGACCCCACTGGCTGAGAATCTGG |
| 709 | MYO1B | 0.38 | ACTTGTCCTCAGCTTGGGCTTCTTC |
| 710 | CAST | 0.31 | TGCCTGCTCCTGTACTTGTCCTCAG |
| 711 | RRAS2 | 0.52 | AAATGTTTCCTTGTGCCTGCTCCTG |
| 712 | QKI | 0.31 | ACTTGTCCTCAGCTTGGGCTTCTTC |
| 713 | LHFPL2 | 0.36 | TCCTTGTGCCTGCTCCTGTACTTGT |
| 714 | SEPT10 | 0.38 | GCCCCACTGGACAACACTGATTCCT |
| 715 | ARHE | 0.5 | AAGCCTATACGTTTCTGTGGAGTAA |
| 716 | KIAA1078 | 0.34 | AAGCCTATACGTTTCTGTGGAGTAA |
| 717 | FTL | 0.38 | TCCTGTACTTGTCCTCAGCTTGGGC |
| 718 | KIAA0877 | 0.41 | AAATGTTTCCTTGTGCCTGCTCCTG |
| 719 | PLCB1 | 0.3 | AAGCCTATACGTTTCTGTGGAGTAA |
| 720 | KIAA0802 | 0.32 | TGCCTGCTCCTGTACTTGTCCTCAG |
| 721 | RAB3GAP | 0.43 | TGCCTGCTCCTGTACTTGTCCTCAG |
| 722 | SERPINB1 | 0.46 | TGCCTGCTCCTGTACTTGTCCTCAG |
| 723 | TIMM17A | 0.38 | AAATGTTTCCTTGTGCCTGCTCCTG |
| 724 | SOD2 | 0.35 | TTGGACATCTCTAGTGTAGCTGCCA |
| 725 | HLA-A | 0.33 | TTGGACATCTCTAGTGTAGCTGCCA |
| 726 | NOMO2 | 0.43 | CACCCAGCTGGTCCTGTGGATGGGA |
| 727 | LOC55831 | 0.32 | TCCTGTACTTGTCCTCAGCTTGGGC |
| 728 | PHLDA1 | 0.32 | CACCCAGCTGGTCCTGTGGATGGGA |
| 729 | TMEM2 | 0.47 | TGGACCCCACTGGCTGAGAATCTGG |
| 730 | MLPH | 0.35 | ACTTGTCCTCAGCTTGGGCTTCTTC |
| 731 | FAD104 | 0.34 | ACTTGTCCTCAGCTTGGGCTTCTTC |
| 732 | LRRC5 | 0.42 | CACCCAGCTGGTCCTGTGGATGGGA |
| 733 | RAB7L1 | 0.41 | TTGGACATCTCTAGTGTAGCTGCCA |
| 734 | FLJ35036 | 0.36 | TCCTGTACTTGTCCTCAGCTTGGGC |
| 735 | DOCK10 | 0.41 | TCCTCCATCACCTGAAACACTGGAC |
| 736 | LRP12 | 0.36 | AAGCCTATACGTTTCTGTGGAGTAA |
| 737 | TXNDC5 | 0.4 | ACTTGTCCTCAGCTTGGGCTTCTTC |
| 738 | CDC14B | 0.39 | TGCCTGCTCCTGTACTTGTCCTCAG |
| 739 | HRMT1L1 | 0.38 | CACCCAGCTGGTCCTCTGGATGGGA |
| 740 | DNAJC10 | 0.31 | TTGGACATCTCTAGTGTAGCTGCCA |
| 741 | TNPO1 | 0.33 | GCCCCACTGGACAACACTGATTCCT |
| 742 | LONP | 0.32 | AAATGTTTCCTTGTGCCTGCTCCTG |
| 743 | AMIGO2 | 0.38 | AAGCCTATACGTTTCTGTGGAGTAA |
| 744 | DNAPTP6 | 0.31 | TGCCTGCTCCTGTACTTGTCCTCAG |
| 745 | ADAMTS1 | 0.37 | TTGGACATCTCTAGTGTAGCTGCCA |

TABLE 43
Rituximab (e.g., Mabthera) biomarkers.

| | | | |
|---|---|---|---|
| SEQ | | | |
| ID | | Corre- | |
| NO | Gene | lation | Medianprobe |

| | | | |
|---|---|---|---|
| 746 | PSMB2 | 0.89 | TCCTCCATCACCTGAAACACTGGAC |
| 747 | BAT1 | 0.88 | AAGCCTATACGTTTCTGTGGAGTAA |
| 748 | ASCC3L1 | 0.89 | TCCTTGTGCCTGCTCCTGTACTTGT |
| 749 | SET | 0.94 | AAATGTTTCCTTGTGCCTGCTCCTG |
| 750 | YWHAZ | 0.83 | TCCTTGTGCCTGCTCCTGTACTTGT |
| 751 | GLUL | 0.8 | TGGACCCCACTGGCTGAGAATCTGG |
| 752 | LDHA | 0.8 | TCCTTGTGCCTGCTCCTGTACTTGT |
| 753 | HMGB1 | 0.84 | AAATGTTTCCTTGTGCCTGCTCCTG |
| 754 | SFRS2 | 0.87 | AAATGTTTCCTTGTGCCTGCTCCTG |
| 755 | DPYSL2 | 0.82 | TCCTGTACTTGTCCTCAGCTTGGGC |
| 756 | MGC8721 | 0.82 | CACCCAGCTGGTCCTGTGGATGGGA |
| 757 | NOL5A | 0.86 | TGCCTGCTCCTGTACTTGTCCTCAG |
| 758 | SFRS10 | 0.88 | AAATGTTTCCTTGTGCCTGCTCCTG |
| 759 | SF3B1 | 0.82 | TCCTGTACTTGTCCTCAGCTTGGGC |
| 760 | K-ALPHA-1 | 0.86 | TGCCTGCTCCTGTACTTGTCCTCAG |
| 761 | TXNRD1 | 0.86 | TGGACCCCACTGGCTGAGAATCTGG |
| 762 | ARHGDIB | 0.83 | CACCCAGCTGGTCCTGTGGATGGGA |
| 763 | ZFP36L2 | 0.92 | TTGGACATCTCTAGTGTAGCTGCCA |
| 764 | DHX15 | 0.81 | TGGACCCCACTGGCTGAGAATCTGG |
| 765 | SOX4 | 0.85 | CACCCAGCTGGTCCTGTGGATGGGA |
| 766 | GRSF1 | 0.81 | TGGACCCCACTGGCTGAGAATCTGG |
| 767 | MCM3 | 0.85 | GCCCCACTGGACAACACTGATTCCT |
| 768 | IFITM1 | 0.82 | TCCTCCATCACCTGAAACACTGGAC |
| 769 | RPA2 | 0.86 | TCCTCCATCACCTGAAACACTGGAC |
| 770 | LBR | 0.87 | ACTTGTCCTCAGCTTGGGCTTCTTC |
| 771 | CKS1B | 0.85 | AAGCCTATACGTTTCTGTGGAGTAA |
| 772 | NASP | 0.82 | TGGACCCCACTGGCTGAGAATCTGG |
| 773 | HNRPDL | 0.81 | TCCTCCATCACCTGAAACACTGGAC |
| 774 | CUGBP2 | 0.81 | TGCCTGCTCCTGTACTTGTCCTCAG |
| 775 | PTBP1 | 0.87 | TCCTTGTGCCTGCTCCTGTACTTGT |
| 776 | ARL7 | 0.83 | TTGGACATCTCTAGTGTAGCTGCCA |
| 777 | CTCF | 0.83 | ACTTGTCCTCAGCTTGGGCTTCTTC |
| 778 | HMGCR | 0.86 | TCCTTGTGCCTGCTCCTGTACTTGT |
| 779 | ITM2A | 0.88 | AAATGTTTCCTTGTGCCTGCTCCTG |
| 780 | SFRS3 | 0.93 | TCCTTGTGCCTGCTCCTGTACTTGT |
| 781 | SRPK2 | 0.82 | TCCTTGTGCCTGCTCCTGTACTTGT |
| 782 | JARID2 | 0.92 | CACCCAGCTGGTCCTGTGGATGGGA |
| 783 | M96 | 0.84 | TCCTGTACTTGTCCTCAGCTTGGGC |
| 784 | MAD2L1 | 0.87 | TCCTCCATCACCTGAAACACTGGAC |
| 785 | SATB1 | 0.81 | ACTTGTCCTCAGCTTGGGCTTCTTC |
| 786 | TMPO | 0.9 | ACTTGTCCTCAGCTTGGGCTTCTTC |
| 787 | SIVA | 0.84 | ACTTGTCCTCAGCTTGGGCTTCTTC |
| 788 | SEMA4D | 0.9 | TCCTCCATCACCTGAAACACTGGAC |
| 789 | TFDP2 | 0.87 | TCCTTGTGCCTGCTCCTGTACTTGT |
| 790 | SKP2 | 0.86 | AAGCCTATACGTTTCTGTGGAGTAA |
| 791 | SH3YL1 | 0.88 | GCCCCACTGGACAACACTGATTCCT |
| 792 | RFC4 | 0.87 | TCCTCCATCACCTGAAACACTGGAC |
| 793 | PCBP2 | 0.83 | AAGCCTATACGTTTCTGTGGAGTAA |
| 794 | IL2RG | 0.84 | GCCCCACTGGACAACACTGATTCCT |
| 795 | CDC45L | 0.89 | TCCTGTACTTGTCCTCAGCTTGGGC |
| 796 | GTSE1 | 0.83 | TTGGACATCTCTAGTGTAGCTGCCA |
| 797 | KIF11 | 0.85 | AAGCCTATACGTTTCTGTGGAGTAA |
| 798 | FEN1 | 0.88 | TTGGACATCTCTAGTGTAGCTGCCA |
| 799 | MYB | 0.9 | TGGACCCCACTGGCTGAGAATCTGG |
| 800 | LCK | 0.87 | TCCTCCATCACCTGAAACACTGGAC |
| 801 | CENPA | 0.84 | GCCCCACTGGACAACACTGATTCCT |
| 802 | CCNE2 | 0.84 | GCCCCACTGGACAACACTGATTCCT |
| 803 | H2AFX | 0.88 | TTGGACATCTCTAGTGTAGCTGCCA |
| 804 | SNRPG | 0.84 | TCCTCCATCACCTGAAACACTGGAC |
| 805 | CD3G | 0.94 | TCCTTGTGCCTGCTCCTGTACTTGT |
| 806 | STK6 | 0.9 | ACTTGTCCTCAGCTTGGGGTTCTTC |
| 807 | PTP4A2 | 0.81 | TGCCTGCTCCTGTACTTGTCCTCAG |
| 808 | FDFT1 | 0.91 | AAATGTTTCCTTGTGCCTGCTCCTG |
| 809 | HSPA8 | 0.84 | AAATGTTTCCTTGTGCCTGCTCCTG |
| 810 | HNRPR | 0.94 | TCCTTGTGCCTGCTCCTGTACTTGT |
| 811 | MCM7 | 0.92 | AAATGTTTCCTTGTGCCTGCTCCTG |
| 812 | SFRS6 | 0.85 | TGGACCCCACTGGCTGAGAATCTGG |
| 813 | PAK2 | 0.8 | CACCCAGCTGGTCCTGTGGATGGGA |
| 814 | LCP1 | 0.85 | TCCTGTACTTGTCCTCAGCTTGGGC |
| 815 | STAT3 | 0.81 | ACTTGTCCTCAGCTTGGGCTTCTTC |
| 816 | OK/SW-cl.56 | 0.8 | TCCTTGTGCCTGCTCCTGTACTTGT |
| 817 | WHSC1 | 0.81 | TGGACCCCACTGGCTGAGAATCTGG |
| 818 | DIAPH1 | 0.88 | AAGCCTATACGTTTCTGTGGAGTAA |
| 819 | KIF2C | 0.88 | TCCTGTACTTGTCCTCAGCTTGGGC |
| 820 | HDGFRP3 | 0.89 | CACCCAGCTGGTCCTGTGGATGGGA |
| 821 | PNMA2 | 0.93 | TTGGACATCTCTAGTGTAGCTGCCA |
| 822 | GATA3 | 0.93 | TCCTGTACTTGTCCTCAGCTTGGGC |
| 823 | BUB1 | 0.88 | AAATGTTTCCTTGTGCCTGCTCCTG |
| 824 | TPX2 | 0.8 | CACCCAGCTGGTCCTGTGGATGGGA |
| 825 | SH2D1A | 0.86 | TCCTTGTGCCTGCTCCTGTACTTGT |
| 826 | TNFAIP8 | 0.9 | TCCTCCATCACCTGAAACACTGGAC |
| 827 | CSE1L | 0.83 | AAATGTTTCCTTGTGCCTGCTCCTG |
| 828 | MCAM | 0.8 | TCCTGTACTTGTCCTCAGCTTGGGC |
| 829 | AF1Q | 0.83 | GCCCCACTGGACAACACTGATTCCT |
| 830 | CD47 | 0.86 | CACCCAGCTGGTCCTGTGGATGGGA |
| 831 | SFRS1 | 0.85 | AAGCCTATACGTTTCTGTGGAGTAA |
| 832 | FYB | 0.92 | TCCTGTACTTGTCCTCAGCTTGGGC |
| 833 | TRB@ | 0.84 | ACTTGTCCTCAGCTTGGGCTTCTTC |
| 834 | CXCR4 | 0.94 | GCCCCACTGGACAACACTGATTCCT |
| 835 | H3F3B | 0.84 | TCCTCCATCACCTGAAACACTGGAC |
| 836 | MKI67 | 0.83 | ACTTGTCCTCAGCTTGGGCTTCTTC |
| 837 | MAC30 | 0.82 | TCCTTGTGCCTGCTCCTGTACTTGT |
| 838 | ARID5B | 0.88 | AAGCCTATACGTTTCTGTGGAGTAA |
| 839 | LOC339287 | 0.81 | AAGCCTATACGTTTCTGTGGAGTAA |
| 840 | CD3D | 0.82 | TCCTTGTGCCTGCTCCTGTACTTGT |
| 841 | ZAP70 | 0.87 | AAGCCTATACGTTTCTGTGGAGTAA |
| 842 | LAPTM4B | 0.83 | TCCTCCATCACCTGAAACACTGGAC |
| 843 | SFRS7 | 0.87 | TCCTTGTGCCTGCTCCTGTACTTGT |
| 844 | HNRPA1 | 0.9 | AAGCCTATACGTTTCTGTGGAGTAA |
| 845 | HSPCA | 0.88 | AAGCCTATACGTTTCTGTGGAGTAA |
| 846 | AIF1 | 0.82 | TCCTTGTGCCTGCTCCTGTACTTGT |
| 847 | GTF3A | 0.87 | AAGCCTATACGTTTCTGTGGAGTAA |
| 848 | MCM5 | 0.91 | TTGGACATCTCTAGTGTAGCTGCCA |
| 849 | GTL3 | 0.85 | AAGCCTATACGTTTCTGTGGAGTAA |
| 850 | ZNF22 | 0.89 | TGCCTGCTCCTGTACTTGTCCTCAG |
| 851 | FLJ22794 | 0.83 | GCCCCACTGGACAACACTGATTCCT |
| 852 | LZTFL1 | 0.89 | ACTTGTCCTCAGCTTGGGCTTCTTC |
| 853 | e(y)2 | 0.87 | TCCTCCATCACCTGAAACACTGGAC |
| 854 | FLJ20152 | 0.92 | TCCTCCATCACCTGAAACACTGGAC |
| 855 | C10orf3 | 0.86 | ACTTGTCCTCAGCTTGGGCTTCTTC |
| 856 | NRN1 | 0.86 | AAATGTTTCCTTGTGCCTGCTCCTG |
| 857 | FLJ10858 | 0.81 | GCCCCACTGGACAACACTGATTCCT |
| 858 | BCL11B | 0.89 | GCCCCACTGGACAACACTGATTCCT |
| 859 | ASPM | 0.91 | AAGCCTATACGTTTCTGTGGAGTAA |
| 860 | LEF1 | 0.9 | TTGGACATCTCTAGTGTAGCTGCCA |
| 861 | LOC146909 | 0.83 | ACTTGTCCTCAGCTTGGGCTTCTTC |

TABLE 44
5-Aza-2′-deoxycytidine (decitabine) biomarkers.

| | | | |
|---|---|---|---|
| SEQ | | | |
| ID | | Corre- | |
| NO | Gene | lation | Medianprobe |

| | | | |
|---|---|---|---|
| 862 | CD99 | 0.31 | TTGGACATCTCTAGTGTAGCTGCCA |
| 863 | SNRPA | 0.32 | TCCTGTACTTGTCCTCAGCTTGGGC |
| 864 | CUGBP2 | 0.32 | TCCTGTACTTGTCCTCAGCTTGGGC |
| 865 | STAT5A | 0.32 | GCCCCACTGGACAACACTGATTCCT |
| 866 | SLA | 0.38 | TTGGACATCTCTAGTGTAGCTGCCA |
| 867 | IL2RG | 0.33 | TGGACCCCACTGGCTGAGAATCTGG |
| 868 | GTSE1 | 0.32 | ACTTGTCCTCAGCTTGGGCTTCTTC |
| 869 | MYB | 0.36 | TGGACCCCACTGGCTGAGAATCTGG |
| 870 | PTPN7 | 0.33 | TCCTGTACTTGTCCTCAGCTTGGGC |
| 871 | CXorf9 | 0.42 | TCCTGTACTTGTCCTCAGCTTGGGC |
| 872 | RHOH | 0.38 | AAATGTTTCCTTGTGCCTGCTCCTG |
| 873 | ZNFN1A1 | 0.33 | AAGCCTATACGTTTCTGTGGAGTAA |
| 874 | CENTB1 | 0.35 | CACCCAGCTGGTCCTGTGGATGGGA |
| 875 | LCP2 | 0.3 | AAATGTTTCCTTGTGCCTGCTCCTG |
| 876 | HIST1H4C | 0.33 | TGGACCCCACTGGCTGAGAATCTGG |
| 877 | CCR7 | 0.37 | TGCCTGCTCCTGTACTTGTCCTCAG |
| 878 | APOBEC3B | 0.31 | TCCTTGTGCCTGCTCCTGTACTTGT |
| 879 | MCM7 | 0.31 | TGGACCCCACTGGCTGAGAATCTGG |
| 880 | LCP1 | 0.31 | AAGCCTATACGTTTCTGTGGAGTAA |
| 881 | SELPLG | 0.4 | TGGACCCCACTGGCTGAGAATCTGG |
| 882 | CD3Z | 0.35 | TCCTGTACTTGTCCTCAGCTTGGGC |
| 883 | PRKCQ | 0.39 | TGCCTGCTCCTGTACTTGTCCTCAG |
| 884 | GZMB | 0.32 | GCCCCACTGGACAACACTGATTCCT |
| 885 | SCN3A | 0.4 | AAGCCTATACGTTTCTGTGGAGTAA |
| 886 | LAIR1 | 0.35 | TGCCTGCTCCTGTACTTGTCCTCAG |
| 887 | SH2D1A | 0.35 | GCCCCACTGGACAACACTGATTCCT |
| 888 | SEPT6 | 0.35 | ACTTGTCCTCAGCTTGGGCTTCTTC |
| 889 | CG018 | 0.32 | ACTTGTCCTCAGCTTGGGCTTCTTC |
| 890 | CD3D | 0.31 | TGGACCCCACTGGCTGAGAATCTGG |
| 891 | C18orf10 | 0.33 | TCCTTGTGCCTGCTCCTGTACTTGT |
| 892 | PRF1 | 0.31 | TCCTCCATCACCTGAAACACTGGAC |
| 893 | AIF1 | 0.31 | TTGGACATCTCTAGTGTAGCTGCCA |
| 894 | MCM5 | 0.31 | ACTTGTCCTCAGCTTGGGCTTCTTC |
| 895 | LPXN | 0.35 | TCCTCCATCACCTGAAACACTGGAC |
| 896 | C22orf18 | 0.33 | AAATGTTTCCTTGTGCCTGCTCCTG |
| 897 | ARHGAP15 | 0.31 | AAATGTTTCCTTGTGCCTGCTCCTG |
| 898 | LEF1 | 0.43 | GCCCCACTGGACAACACTGATTCCT |

TABLE 45
Idarubicin biomarkers.

| | | | |
|---|---|---|---|
| SEQ | | | |
| ID | | Corre- | |
| NO | Gene | lation | Medianprobe |

| | | | |
|---|---|---|---|
| 899 | SLC9A3R1 | 0.31 | TGGACCCCACTGGCTGAGAATCTGG |
| 900 | RPS19 | 0.32 | TGGACCCCACTGGCTGAGAATCTGG |
| 901 | ITM2A | 0.34 | TCCTGTACTTGTCCTCAGCTTGGGC |
| 902 | SSBP2 | 0.31 | AAGCCTATACGTTTCTGTGGAGTAA |
| 903 | CXorf9 | 0.31 | TCCTGTACTTGTCCTCAGCTTGGGC |
| 904 | RHOH | 0.32 | TCCTCCATCACCTGAAACACTGGAC |
| 905 | ZNFN1A1 | 0.36 | AAATGTTTCCTTGTGCCTGCTCCTG |
| 906 | FXYD2 | 0.35 | CACCCAGCTGGTCCTGTGGATGGGA |
| 907 | CCR9 | 0.39 | TGGACCCCACTGGCTGAGAATCTGG |
| 908 | NAP1L1 | 0.3 | TTGGACATCTCTAGTGTAGCTGCCA |
| 909 | CXCR4 | 0.31 | AAATGTTTCCTTGTGCCTGCTCCTG |
| 910 | SH2D1A | 0.3 | TCCTGTACTTGTCCTCAGCTTGGGC |
| 911 | CD1A | 0.3 | AAGCCTATACGTTTCTGTGGAGTAA |
| 912 | TRB@ | 0.32 | AAATGTTTCCTTGTGCCTGCTCCTG |
| 913 | SEPT6 | 0.32 | GCCCCACTGGACAACACTGATTCCT |
| 914 | RPS2 | 0.33 | TGCCTGCTCCTGTACTTGTCCTCAG |
| 915 | DOCK2 | 0.32 | TGCCTGCTCCTGTACTTGTCCTCAG |
| 916 | CD3D | 0.31 | ACTTGTCCTCAGCTTGGGCTTCTTC |
| 917 | CD6 | 0.3 | GCCCCACTGGACAACACTGATTCCT |
| 918 | ZAP70 | 0.34 | ACTTGTCCTCAGCTTGGGCTTCTTC |
| 919 | AIF1 | 0.3 | TGCCTGCTCCTGTACTTGTCCTCAG |
| 920 | CD1E | 0.32 | TGCCTGCTCCTGTACTTGTCCTCAG |
| 921 | CYFIP2 | 0.3 | TTGGACATCTCTAGTGTAGCTGCCA |
| 922 | ADA | 0.41 | TCCTGTACTTGTCCTCAGCTTGGGC |
| 923 | TRIM | 0.31 | TCCTTGTGCCTGCTCCTGTACTTGT |
| 924 | GLTSCR2 | 0.32 | TGCCTGCTCCTGTACTTGTCCTCAG |
| 925 | FLJ10858 | 0.35 | GCCCCACTGGACAACACTGATTCCT |
| 926 | BCL11B | 0.34 | TCCTGTACTTGTCCTCAGCTTGGGC |
| 927 | GIMAP6 | 0.36 | TGCCTGCTCCTGTACTTGTCCTCAG |
| 928 | STAG3 | 0.34 | TTGGACATCTCTAGTGTAGCTGCCA |
| 929 | UBASH3A | 0.39 | ACTTGTCCTCAGCTTGGGCTTCTTC |

TABLE 46
Melphalan biomarkers.

| | | | |
|---|---|---|---|
| SEQ | | | |
| ID | | Corre- | |
| NO | Gene | lation | Medianprobe |

| | | | |
|---|---|---|---|
| 930 | CD99 | 0.31 | TGGACCCCACTGGCTGAGAATCTGG |
| 931 | HLA-DPB1 | 0.32 | TGCCTGCTCCTGTACTTGTCCTCAG |
| 932 | ARHGDIB | 0.35 | TGCCTGCTCCTGTACTTGTCCTCAG |
| 933 | IFITM1 | 0.33 | CACCCAGCTGGTCCTGTGGATGGGA |
| 934 | UBE2L6 | 0.32 | TCCTTGTGCCTGCTCCTGTACTTGT |
| 935 | ITM2A | 0.37 | TCCTTGTGCCTGCTCCTGTACTTGT |
| 936 | SERPINA1 | 0.31 | AAATGTTTCCTTGTGCCTGCTCCTG |
| 937 | STAT5A | 0.38 | AAATGTTTCCTTGTGCCTGCTCCTG |
| 938 | INPP5D | 0.37 | TCCTTGTGCCTGCTCCTGTACTTGT |
| 939 | DGKA | 0.3 | TGCCTGCTCCTGTACTTGTCCTCAG |
| 940 | SATB1 | 0.34 | TGCCTGCTCCTGTACTTGTCCTCAG |
| 941 | SEMA4D | 0.37 | AAATGTTTCCTTGTGCCTGCTCCTG |
| 942 | TFDP2 | 0.31 | CACCCAGCTGGTCCTGTGGATGGGA |
| 943 | SLA | 0.49 | TCCTCCATCACCTGAAACACTGGAC |
| 944 | IL2RG | 0.42 | CACCCAGCTGGTCCTGTGGATGGGA |
| 945 | CD48 | 0.33 | TCCTTGTGCCTGCTCCTGTACTTGT |
| 946 | MFNG | 0.48 | ACTTGTCCTCAGCTTGGGCTTCTTC |
| 947 | ALOX5AP | 0.3 | CACCCAGCTGGTCCTGTGGATGGGA |
| 948 | GPSM3 | 0.31 | AAGCCTATACGTTTCTGTGGAGTAA |
| 949 | PSMB9 | 0.34 | GCCCCACTGGACAACACTGATTCCT |
| 950 | KIAA0711 | 0.37 | TGGACCCCACTGGCTGAGAATCTGG |
| 951 | SELL | 0.32 | AAATGTTTCCTTGTGCCTGCTCCTG |
| 952 | ADA | 0.31 | TGCCTGCTCCTGTACTTGTCCTCAG |
| 953 | EDG1 | 0.49 | TTGGACATCTCTAGTGTAGCTGCCA |
| 954 | RIMS3 | 0.3 | CACCCAGCTGGTCCTGTGGATGGGA |
| 955 | FMNL1 | 0.33 | AAGCCTATACGTTTCTGTGGAGTAA |
| 956 | MYB | 0.3 | GCCCCACTGGACAACACTGATTCCT |
| 957 | PTPN7 | 0.34 | AAATGTTTCCTTGTGCCTGCTCCTG |
| 958 | LCK | 0.31 | AAATGTTTCCTTGTGCCTGCTCCTG |
| 959 | CXorf9 | 0.55 | CACCCAGCTGGTCCTGTGGATGGGA |
| 960 | RHOH | 0.35 | TGGACCCCACTGGCTGAGAATCTGG |
| 961 | ZNFN1A1 | 0.31 | ACTTGTCCTCAGCTTGGGCTTCTTC |
| 962 | CENTB1 | 0.32 | TGCCTGCTCCTGTACTTGTCCTCAG |
| 963 | LCP2 | 0.32 | TCCTTGTGCCTGCTCCTGTACTTGT |
| 964 | FXYD2 | 0.55 | CACCCAGCTGGTCCTGTGGATGGGA |
| 965 | CD1D | 0.44 | AAGCCTATACGTTTCTGTGGAGTAA |
| 966 | BATF | 0.32 | TGCCTGCTCCTGTACTTGTCCTCAG |
| 967 | STAT4 | 0.33 | TCCTCCATCACCTGAAACACTGGAC |
| 968 | VAV1 | 0.31 | TCCTCCATCACCTGAAACACTGGAC |
| 969 | MAP4K1 | 0.39 | CACCCAGCTGGTCCTGTGGATGGGA |
| 970 | CCR7 | 0.44 | TCCTGTACTTGTCCTCAGCTTGGGC |
| 971 | PDE4C | 0.32 | TCCTGTACTTGTCCTCAGCTTGGGC |
| 972 | CD3G | 0.32 | AAGCCTATACGTTTCTGTGGAGTAA |
| 973 | CCR9 | 0.36 | TTGGACATCTCTAGTGTAGGTGCCA |
| 974 | SP110 | 0.34 | TCCTGTACTTGTCCTCAGCTTGGGC |
| 975 | LCP1 | 0.35 | AAATGTTTCCTTGTGCCTGCTCCTG |
| 976 | IFI16 | 0.32 | GCCCCACTGGACAACACTGATTCCT |
| 977 | CXCR4 | 0.36 | ACTTGTCCTCAGCTTGGGCTTCTTC |
| 978 | ARHGEF6 | 0.47 | AAGCCTATACGTTTCTGTGGAGTAA |
| 979 | GATA3 | 0.55 | TTGGACATCTCTAGTGTAGCTGCCA |
| 980 | SELPLG | 0.47 | TTGGACATCTCTAGTGTAGCTGCCA |
| 981 | SEG31L2 | 0.36 | TGGACCCCACTGGCTGAGAATCTGG |
| 982 | CD3Z | 0.5 | TTGGACATCTCTAGTGTAGCTGCCA |
| 983 | PRKCQ | 0.56 | GCCGCACTGGACAACACTGATTCCT |
| 984 | SH2D1A | 0.33 | TCCTCCATCACCTGAAACACTGGAC |
| 985 | GZMB | 0.39 | TGCCTGCTCCTGTACTTGTCCTCAG |
| 986 | CD1A | 0.55 | TGCCTGCTCCTGTACTTGTCCTCAG |
| 987 | SCN3A | 0.64 | CACCCAGCTGGTCCTGTGGATGGGA |
| 988 | LAIR1 | 0.32 | CACCCAGCTGGTCCTGTGGATGGGA |
| 989 | FYB | 0.49 | TTGGACATCTCTAGTGTAGCTGCCA |
| 990 | TRB@ | 0.37 | TTGGACATCTCTAGTGTAGCTGCCA |
| 991 | SEPT6 | 0.32 | GCCCCACTGGACAACACTGATTCCT |
| 992 | HA-1 | 0.48 | GCCCCACTGGACAACACTGATTCCT |
| 993 | DOCK2 | 0.33 | TTGGACATCTCTAGTGTAGCTGCCA |
| 994 | CG018 | 0.37 | AAATGTTTCCTTGTGCCTGCTCCTG |
| 995 | CD3D | 0.32 | TCCTCCATCACCTGAAACACTGGAC |
| 996 | T3JAM | 0.41 | TGCCTGCTCCTGTACTTGTCCTCAG |
| 997 | FNBP1 | 0.36 | TCCTGTACTTGTCCTCAGCTTGGGC |
| 998 | CD6 | 0.36 | AAGCCTATACGTTTCTGTGGAGTAA |
| 999 | ZAP70 | 0.36 | TGGACCCCACTGGCTGAGAATCTGG |
| 1000 | LST1 | 0.31 | ACTTGTCCTCAGCTTGGGCTTCTTC |
| 1001 | GPR65 | 0.42 | TTGGACATCTCTAGTGTAGCTGCCA |
| 1002 | PRF1 | 0.41 | GCCCCACTGGACAACACTGATTCCT |
| 1003 | AIF1 | 0.32 | GCCCCACTGGACAACACTGATTCCT |
| 1004 | FLJ20331 | 0.42 | TCCTCCATCACCTGAAACACTGGAC |
| 1005 | RAG2 | 0.31 | CACCCAGCTGGTCCTGTGGATGGGA |
| 1006 | WDR45 | 0.37 | TCCTGTACTTGTCCTCAGCTTGGGC |
| 1007 | CD1E | 0.31 | TCCTGTACTTGTCCTCAGCTTGGGC |
| 1008 | CYFIP2 | 0.4 | TCCTCCATCACCTGAAACACTGGAC |
| 1009 | TARP | 0.36 | CACCCAGCTGGTCCTGTGGATGGGA |
| 1010 | TRIM | 0.31 | ACTTGTCCTCAGCTTGGGCTTCTTC |
| 1011 | RPL10L | 0.3 | TTGGACATCTCTAGTGTAGCTGCCA |
| 1012 | GLTSCR2 | 0.46 | CACCCAGCTGGTCCTGTGGATGGGA |
| 1013 | GIMAP5 | 0.32 | AAGCCTATACGTTTCTGTGGAGTAA |
| 1014 | ARHGAP15 | 0.36 | TGCCTGCTCCTGTACTTGTCCTCAG |
| 1015 | NOTCH1 | 0.34 | GCCCCACTGGACAACACTGATTCCT |
| 1016 | BIN2 | 0.36 | TGGACCCCACTGGCTGAGAATCTGG |
| 1017 | C13orf18 | 0.34 | TCCTTGTGCCTGCTCCTGTACTTGT |
| 1018 | CECR1 | 0.32 | TCCTGTACTTGTCCTCAGCTTGGGC |
| 1019 | BCL11B | 0.32 | TCCTTGTGCCTGCTCCTGTACTTGT |
| 1020 | GIMAP6 | 0.3 | TCCTTGTGCCTGCTCCTGTACTTGT |
| 1021 | STAG3 | 0.58 | TTGGACATCTCTAGTGTAGCTGCCA |
| 1022 | TM6SF1 | 0.31 | TCCTGTACTTGTCCTCAGCTTGGGC |
| 1023 | HSD17B7 | 0.32 | GCCCCACTGGACAACACTGATTCCT |
| 1024 | UBASH3A | 0.3 | ACTTGTCCTCAGCTTGGGCTTCTTC |
| 1025 | MGC5566 | 0.45 | TCCTCCATCACCTGAAACACTGGAC |
| 1026 | FLJ22457 | 0.39 | AAGCCTATACGTTTCTGTGGAGTAA |
| 1027 | TPK1 | 0.33 | TGCCTGCTCCTGTACTTGTCCTCAG |
| 1028 | PHF11 | 0.3 | AAATGTTTCCTTGTGCCTGCTCCTG |
| 1029 | DKFZP434B0335 | 0.4 | TCCTTGTGCCTGCTCCTGTACTTGT |

TABLE 47
IL4-PR38 fusion protein biomarkers.

| | | | |
|---|---|---|---|
| SEQ | | | |
| ID | | Corre- | |
| NO | Gene | lation | Medianprobe |

| | | | |
|---|---|---|---|
| 1030 | MCL1 | 0.3 | TCCTGCATCACCTGAAACACTGGAC |
| 1031 | DDX23 | 0.35 | CACCCAGCTGGTCCTGTGGATGGGA |
| 1032 | JUNB | 0.31 | TGCCTGCTCCTGTACTTGTCCTCAG |
| 1033 | ZFP36 | 0.33 | CACCCAGCTGGTCCTGTGGATGGGA |
| 1034 | IFITM1 | 0.32 | ACTTGTCCTCAGCTTGGGCTTCTTC |
| 1035 | CKS1B | 0.3 | TGGACCCCACTGGCTGAGAATCTGG |
| 1036 | SERPINA1 | 0.31 | GCCCCACTGGACAACACTGATTCCT |
| 1037 | IL4R | 0.3 | ACTTGTCCTCAGCTTGGGCTTCTTC |
| 1038 | CLDN3 | 0.31 | ACTTGTCCTCAGCTTGGGCTTCTTC |
| 1039 | ARL4A | 0.33 | AAATGTTTCCTTGTGCCTGCTCCTG |
| 1040 | HMMR | 0.31 | TCCTTGTGCCTGCTCCTGTACTTGT |
| 1041 | FLJ12671 | 0.42 | TCCTTGTGCCTGCTCCTGTACTTGT |
| 1042 | ANKHD1 | 0.42 | GCCCCACTGGACAACACTGATTCCT |
| 1043 | KIF2C | 0.37 | ACTTGTCCTCAGCTTGGGCTTCTTC |
| 1044 | RPA3 | 0.34 | CACCCAGCTGGTCCTGTGGATGGGA |
| 1045 | MCCC2 | 0.34 | TGCCTGCTCCTGTACTTGTCCTCAG |
| 1046 | CDH17 | 0.32 | TCCTTGTGCCTGCTCCTGTACTTGT |
| 1047 | LSM5 | 0.33 | TTGGACATCTCTAGTGTAGCTGCCA |
| 1048 | PRF1 | 0.32 | GCCCCACTGGACAACACTGATTCCT |
| 1049 | ROD1 | 0.34 | TCCTCCATCACCTGAAACACTGGAC |
| 1050 | FLJ12666 | 0.37 | TCCTCCATCACCTGAAACACTGGAC |
| 1051 | SUV420H1 | 0.31 | TTGGACATCTCTAGTGTAGCTGCCA |
| 1052 | MUC13 | 0.36 | TCCTCCATCACCTGAAACACTGGAC |
| 1053 | C13orf18 | 0.35 | GCCCCACTGGACAACACTGATTCCT |
| 1054 | CDCA8 | 0.35 | TGCCTGCTCCTGTACTTGTCCTCAG |

TABLE 48
Valproic acid (VPA) biomarkers.

| | | | |
|---|---|---|---|
| SEQ | | | |
| ID | | Corre- | |
| NO | Gene | lation | Medianprobe |

| | | | |
|---|---|---|---|
| 1055 | STOM | 0.32 | AAATGTTTCCTTGTGCCTGCTCCTG |
| 1056 | TNFAIP3 | 0.32 | TGGACCCCACTGGCTGAGAATCTGG |
| 1057 | ASNS | 0.31 | GCCCCACTGGACAACACTGATTCCT |
| 1058 | GARS | 0.37 | TGCCTGCTCCTGTACTTGTCCTCAG |
| 1059 | CXCR4 | 0.32 | AAGCCTATACGTTTCTGTGGAGTAA |
| 1060 | EGLN3 | 0.31 | TGGACCCCACTGGCTGAGAATCTGG |
| 1061 | LBH | 0.35 | TCCTGTACTTGTCCTCAGCTTGGGC |
| 1062 | GDF15 | 0.3 | TGCCTGCTCCTGTACTTGTCCTCAG |

TABLE 49
All-trans retinoic acid (ATRA) biomarkers.

| | | | |
|---|---|---|---|
| SEQ | | | |
| ID | | Corre- | |
| NO | Gene | lation | Medianprobe |

| | | | |
|---|---|---|---|
| 1063 | PPIB | 0.31 | AAGCCTATACGTTTCTGTGGAGTAA |
| 1064 | ZFP36L2 | 0.48 | AAGCCTATACGTTTCTGTGGAGTAA |
| 1065 | IFI30 | 0.46 | ACTTGTCCTCAGCTTGGGCTTCTTC |
| 1066 | USP7 | 0.35 | TCCTCCATCACCTGAAACACTGGAC |
| 1067 | SRM | 0.43 | TCCTCCATCACCTGAAACACTGGAC |
| 1068 | SH3BP5 | 0.32 | TGCCTGCTCCTGTACTTGTCCTCAG |
| 1069 | ALDOC | 0.41 | TTGGACATCTCTAGTGTAGCTGCCA |
| 1070 | FADS2 | 0.33 | ACTTGTCCTCAGCTTGGGCTTCTTC |
| 1071 | GUSB | 0.38 | TTGGACATCTCTAGTGTAGCTGCCA |
| 1072 | PSCD1 | 0.48 | TCCTGTACTTGTCCTCAGCTTGGGC |
| 1073 | IQGAP2 | 0.34 | TCCTGTACTTGTCCTCAGCTTGGGC |
| 1074 | STS | 0.34 | GCCCCACTGGACAACACTGATTCCT |
| 1075 | MFNG | 0.36 | TGGACCCCACTGGCTGAGAATCTGG |
| 1076 | FLI1 | 0.33 | ACTTGTCCTCAGCTTGGGCTTCTTC |
| 1077 | PIM2 | 0.35 | TGGACCCCACTGGCTGAGAATCTGG |
| 1078 | INPP4A | 0.54 | TCCTGTACTTGTCCTCAGCTTGGGC |
| 1079 | LRMP | 0.51 | GCCCCACTGGACAACACTGATTCCT |
| 1080 | ICAM2 | 0.3 | AAATGTTTCCTTGTGCCTGCTCCTG |
| 1081 | EVI2A | 0.33 | CACCCAGCTGGTCCTGTGGATGGGA |
| 1082 | MAL | 0.46 | AAATGTTTCCTTGTGCCTGCTCCTG |
| 1083 | BTN3A3 | 0.43 | TTGGACATCTCTAGTGTAGCTGCCA |
| 1084 | PTPN7 | 0.4 | TTGGACATCTCTAGTGTAGCTGCCA |
| 1085 | IL10RA | 0.42 | TTGGACATCTCTAGTGTAGCTGCCA |
| 1086 | SPI1 | 0.41 | AAGCCTATACGTTTCTGTGGAGTAA |
| 1087 | TRAF1 | 0.3 | TGCCTGCTCCTGTACTTGTCCTCAG |
| 1088 | ITGB7 | 0.33 | TCCTTGTGCCTGCTCCTGTACTTGT |
| 1089 | ARHGAP6 | 0.32 | TGGACCCCACTGGCTGAGAATCTGG |
| 1090 | MAP4K1 | 0.52 | GCCCCACTGGACAACACTGATTCCT |
| 1091 | CD28 | 0.34 | AAGCCTATACGTTTCTGTGGAGTAA |
| 1092 | PTP4A3 | 0.3 | TCCTCCATCACCTGAAACACTGGAC |
| 1093 | LTB | 0.32 | ACTTGTCCTCAGCTTGGGCTTCTTC |
| 1094 | Clorf38 | 0.4 | TGCCTGCTCCTGTACTTGTCCTCAG |
| 1095 | WBSCR22 | 0.53 | TCCTCCATCACCTGAAACACTGGAC |
| 1096 | CD8B1 | 0.35 | TCCTCCATCACCTGAAACACTGGAC |
| 1097 | LCP1 | 0.35 | ACTTGTCCTCAGCTTGGGCTTCTTC |
| 1098 | FLJ13052 | 0.31 | TCCTCCATCACCTGAAACACTGGAC |
| 1099 | MEF2C | 0.71 | TTGGACATCTCTAGTGTAGCTGCCA |
| 1100 | PSCDBP | 0.41 | AAATGTTTCCTTGTGCCTGCTCCTG |
| 1101 | IL16 | 0.51 | TGGACCCCACTGGCTGAGAATCTGG |
| 1102 | SELPLG | 0.53 | TGCCTGCTCCTGTACTTGTCCTCAG |
| 1103 | MAGEA9 | 0.6 | AAATGTTTCCTTGTGCCTGCTCCTG |
| 1104 | LAIR1 | 0.43 | TCCTCCATCACCTGAAACACTGGAC |
| 1105 | TNFRSF25 | 0.53 | TCCTCCATCACCTGAAACACTGGAC |
| 1106 | EVI2B | 0.42 | ACTTGTCCTCAGCTTGGGCTTCTTC |
| 1107 | IGJ | 0.37 | TCCTTGTGCCTGCTCCTGTACTTGT |
| 1108 | PDCD4 | 0.47 | AAATGTTTCCTTGTGCCTGCTCCTG |
| 1109 | RASA4 | 0.52 | CACCCAGCTGGTCCTGTGGATGGGA |
| 1110 | HA-1 | 0.73 | AAGCCTATACGTTTCTGTGGAGTAA |
| 1111 | PLCL2 | 0.47 | TCCTGTACTTGTCCTCAGCTTGGGC |
| 1112 | RNASE6 | 0.31 | AAGCCTATACGTTTCTGTGGAGTAA |
| 1113 | WBSCR20C | 0.35 | TTGGACATCTCTAGTGTAGCTGCCA |
| 1114 | NUP210 | 0.36 | AAGCCTATACGTTTCTGTGGAGTAA |
| 1115 | RPL10L | 0.39 | ACTTGTCCTCAGCTTGGGCTTCTTC |
| 1116 | C11orf2 | 0.33 | TGGACCCCACTGGCTGAGAATCTGG |
| 1117 | CABC1 | 0.32 | TGCCTGCTCCTGTACTTGTCCTCAG |
| 1118 | ARHGEF3 | 0.37 | TCCTGTACTTGTCCTCAGCTTGGGC |
| 1119 | TAPBPL | 0.42 | TGCCTGCTCCTGTACTTGTCCTCAG |
| 1120 | CHST12 | 0.35 | AAATGTTTCCTTGTGCCTGCTCCTG |
| 1121 | FKBP11 | 0.54 | TGCCTGCTCCTGTACTTGTCCTCAG |
| 1122 | FLJ35036 | 0.42 | TTGGACATCTCTAGTGTAGCTGCCA |
| 1123 | MYLIP | 0.38 | CACCCAGCTGGTCCTGTGGATGGGA |
| 1124 | TXNDC5 | 0.31 | ACTTGTCCTCAGCTTGGGCTTGTTC |
| 1125 | PACAP | 0.3 | TCCTCCATCACCTGAAACACTGGAC |
| 1126 | TOSO | 0.34 | TCCTGTACTTGTCCTCAGCTTGGGC |
| 1127 | PNAS-4 | 0.37 | TGGACCCCACTGGCTGAGAATCTGG |
| 1128 | IL21R | 0.57 | AAGCCTATACGTTTCTGTGGAGTAA |
| 1129 | TCF4 | 0.64 | TCCTTGTGCCTGCTCCTGTACTTGT |

TABLE 50
Cytoxan biomarkers.

| SEQ | | | |
|---|---|---|---|
| ID | | Corre- | |
| NO | Gene | lation | Medianprobe |
| 1130 | C6orf29 | 0.31 | AAGCCTATACGTTTCTGTGGAGTAA |
| 1131 | TRIM31 | 0.31 | AAATGTTTCCTTGTGCCTGCTCCTG |
| 1132 | CD69 | 0.37 | GCCCCACTGGACAACACTGATTCCT |
| 1133 | LRRN3 | 0.31 | ACTTGTCCTCAGCTTGGGCTTCTTC |
| 1134 | GPR35 | 0.41 | TCCTCCATCACCTGAAACACTGGAC |
| 1135 | CDW52 | 0.48 | TTGGACATCTCTAGTGTAGCTGCCA |

TABLE 51
Topotecan (Hycamtin) biomarkers.

| | | | |
|---|---|---|---|
| SEQ | | | |
| ID | | Corre- | |
| NO | Gene | lation | Medianprobe |

| | | | |
|---|---|---|---|
| 1136 | K-ALPHA-1 | 0.32 | AAGCCTATACGTTTCTGTGGAGTAA |
| 1137 | CSDA | 0.32 | AAGCCTATACGTTTCTGTGGAGTAA |
| 1138 | UCHL1 | 0.32 | TTGGACATCTCTAGTGTAGCTGCCA |
| 1139 | NAP1L1 | 0.3 | TCCTCCATCACCTGAAACACTGGAC |
| 1140 | ATP5G2 | 0.3 | TCCTGTACTTGTCCTCAGCTTGGGC |
| 1141 | HDGFRP3 | 0.3 | AAGCCTATACGTTTCTGTGGAGTAA |
| 1142 | IFI44 | 0.3 | GCCCCACTGGACAACACTGATTCCT |

TABLE 52

Suberoylanilide hydroxamic acid (SAHA,
vorinostat, Zolinza) biomarkers.

| | | | |
|---|---|---|---|
| SEQ | | | |
| ID | | Corre- | |
| NO | Gene | lation | Medianprobe |

| | | | |
|---|---|---|---|
| 1143 | NOL5A | 0.35 | TCCTTGTGCCTGCTCCTGTACTTGT |
| 1144 | STOM | 0.35 | TGCCTGCTCCTGTACTTGTCCTCAG |
| 1145 | SIAT1 | 0.36 | AAATGTTTCCTTGTGCCTGCTCCTG |
| 1146 | CUGBP2 | 0.39 | GCCCCACTGGACAACACTGATTCCT |
| 1147 | GUSB | 0.33 | TGGACCCCACTGGCTGAGAATCTGG |
| 1148 | ITM2A | 0.34 | TCCTTGTGCCTGCTCCTGTACTTGT |
| 1149 | JARID2 | 0.32 | ACTTGTCCTCAGCTTGGGCTTCTTC |
| 1150 | RUNX3 | 0.32 | CACCCAGCTGGTCCTGTGGATGGGA |
| 1151 | ICAM2 | 0.35 | TGCCTGCTCCTGTACTTGTCCTCAG |
| 1152 | PTPN7 | 0.37 | AAGCCTATACGTTTCTGTGGAGTAA |
| 1153 | VAV1 | 0.35 | TTGGACATCTCTAGTGTAGCTGCCA |
| 1154 | PTP4A3 | 0.42 | AAGCCTATACGTTTCTGTGGAGTAA |
| 1155 | MCAM | 0.35 | ACTTGTCCTCAGCTTGGGCTTCTTC |
| 1156 | MEF2C | 0.32 | ACTTGTCCTCAGCTTGGGCTTCTTC |
| 1157 | IDH3B | 0.3 | TGCCTGCTCCTGTACTTGTCCTCAG |
| 1158 | RFP | 0.31 | TCCTCCATCACCTGAAACACTGGAC |
| 1159 | SEPT6 | 0.31 | TCCTGTACTTGTCCTCAGCTTGGGC |
| 1160 | SLC43A3 | 0.34 | GCCCCACTGGACAACACTGATTCCT |
| 1161 | WBSCR20C | 0.46 | TGGACCCCACTGGCTGAGAATCTGG |
| 1162 | SHMT2 | 0.34 | TCCTGTACTTGTCCTCAGCTTGGGC |
| 1163 | GLTSCR2 | 0.31 | TCCTGTACTTGTCCTCAGCTTGGGC |
| 1164 | CABC1 | 0.33 | TCCTGTACTTGTCCTCAGCTTGGGC |
| 1165 | FLJ20859 | 0.42 | ACTTGTCCTCAGCTTGGGCTTCTTC |
| 1166 | FLJ20010 | 0.51 | TCCTGTACTTGTCCTCAGCTTGGGC |
| 1167 | MGC10993 | 0.33 | TCCTTGTGCCTGCTCCTGTACTTGT |
| 1168 | FKBP11 | 0.31 | TCCTCCATCACCTGAAACACTGGAC |

TABLE 53
Depsipeptide (FR901228) biomarkers.

| SEQ | | | |
|---|---|---|---|
| ID | | Corre- | |
| NO | Gene | lation | Medianprobe |
| 1169 | ZFP36L2 | 0.32 | AAATGTTTCCTTGTGCCTGCTCCTG |
| 1170 | TRIB2 | 0.35 | TGCCTGCTCCTGTACTTGTCCTCAG |
| 1171 | LCP2 | 0.37 | ACTTGTCCTCAGCTTGGGCTTCTTC |
| 1172 | C6orf32 | 0.35 | TGCCTGCTCCTGTACTTGTCCTCAG |
| 1173 | IL16 | 0.34 | CACCCAGCTGGTCCTGTGGATGGGA |
| 1174 | CACNA1G | 0.31 | AAGCCTATACGTTTCTGTGGAGTAA |
| 1175 | SPDEF | 0.31 | GCCCCACTGGACAACACTGATTCCT |
| 1176 | HAB1 | 0.39 | TCCTCCATCACCTGAAACACTGGAC |
| 1177 | TOSO | 0.31 | TGGACCCCACTGGCTGAGAATCTGG |
| 1178 | ARHGAP25 | 0.33 | AAGCCTATACGTTTCTGTGGAGTAA |

TABLE 54
Bortezomib biomarkers.

| | | | |
|---|---|---|---|
| SEQ | | | |
| ID | | Corre- | |
| NO | Gene | lation | Medianprobe |

| | | | |
|---|---|---|---|
| 1179 | PLEKHB2 | 0.32 | AAATGTTTCCTTGTGCCTGCTCCTG |
| 1180 | ARPC1B | 0.32 | TGGACCCCACTGGCTGAGAATCTGG |
| 1181 | MX1 | 0.39 | TCCTTGTGCCTGCTCCTGTACTTGT |
| 1182 | CUGBP2 | 0.37 | AAGCCTATACGTTTCTGTGGAGTAA |
| 1183 | IFI16 | 0.33 | AAGCCTATACGTTTCTGTGGAGTAA |
| 1184 | TNFRSF14 | 0.3 | AAATGTTTCCTTGTGCCTGCTCCTG |
| 1185 | SP110 | 0.39 | TGGACCCCACTGGCTGAGAATCTGG |
| 1186 | ELF1 | 0.33 | TGGACCCCACTGGCTGAGAATCTGG |
| 1187 | LPXN | 0.33 | TCCTGTACTTGTCCTCAGCTTGGGC |
| 1188 | IFRG28 | 0.31 | TCCTGTACTTGTCCTCAGCTTGGGC |
| 1189 | LEF1 | 0.33 | GCCCCACTGGACAACACTGATTCCT |
| 1190 | PYCARD | 0.31 | TCCTGTACTTGTCCTCAGCTTGGGC |

TABLE 55
Leukeran biomarkers.

| | | | |
|---|---|---|---|
| SEQ | | | |
| ID | | Corre- | |
| NO | Gene | lation | Medianprobe |

| | | | |
|---|---|---|---|
| 1191 | SSRP1 | 0.31 | GCCCCACTGGACAACACTGATTCCT |
| 1192 | ALDOC | 0.36 | AAATGTTTCCTTGTGCCTGCTCCTG |
| 1193 | C1QR1 | 0.31 | TGCCTGCTCCTGTACTTGTCCTCAG |
| 1194 | TTF1 | 0.31 | TCCTGTACTTGTCCTCAGCTTGGGC |
| 1195 | PRIM1 | 0.31 | GCCCCACTGGACAACACTGATTCCT |
| 1196 | USP34 | 0.38 | TCCTCCATCACCTGAAACACTGGAC |
| 1197 | TK2 | 0.33 | TCCTGTACTTGTCCTCAGCTTGGGC |
| 1198 | GOLGIN-67 | 0.31 | TGCCTGCTCCTGTACTTGTCCTCAG |
| 1199 | NPD014 | 0.35 | ACTTGTCCTCAGCTTGGGCTTCTTC |
| 1200 | KIAA0220 | 0.31 | TCCTCCATCACCTGAAACACTGGAC |
| 1201 | SLC43A3 | 0.3 | TTGGACATCTCTAGTGTAGCTGCCA |
| 1202 | WBSCR20C | 0.3 | CACCCAGCTGGTCCTGTGGATGGGA |
| 1203 | ICAM2 | 0.3 | TGCCTGCTCCTGTACTTGTCCTCAG |
| 1204 | TEX10 | 0.32 | TGGACCCCACTGGCTGAGAATCTGG |
| 1205 | CHD7 | 0.3 | ACTTGTCCTCAGCTTGGGCTTCTTC |
| 1206 | SAMSN1 | 0.34 | TTGGACATCTCTAGTGTAGCTGCCA |
| 1207 | TPRT | 0.35 | ACTTGTCCTCAGCTTGGGCTTCTTC |

TABLE 56
Fludarabine biomarkers.

| | | | |
|---|---|---|---|
| SEQ | | | |
| ID | | Corre- | |
| NO | Gene | lation | Medianprobe |

| | | | |
|---|---|---|---|
| 1208 | HLA-E | 0.3 | ACTTGTCCTCAGCTTGGGCTTCTTC |
| 1209 | BAT3 | 0.34 | TGCCTGCTCCTGTACTTGTCCTCAG |
| 1210 | ENO2 | 0.37 | TGGACCCCACTGGCTGAGAATCTGG |
| 1211 | UBE2L6 | 0.3 | TCCTGTACTTGTCCTCAGCTTGGGC |
| 1212 | CUGBP2 | 0.35 | TGCCTGCTCCTGTACTTGTCCTCAG |
| 1213 | ITM2A | 0.32 | GCCCCACTGGACAACACTGATTCCT |
| 1214 | PALM2-AKAP2 | 0.41 | GCCCCACTGGACAACACTGATTCCT |
| 1215 | JARID2 | 0.33 | GCCCCACTGGACAACACTGATTCCT |
| 1216 | DGKA | 0.33 | TGGACCCCACTGGCTGAGAATCTGG |
| 1217 | SLC7A6 | 0.4 | AAGCCTATACGTTTCTGTGGAGTAA |
| 1218 | TFDP2 | 0.35 | AAATGTTTCCTTGTGCCTGCTCCTG |
| 1219 | ADA | 0.41 | TGCCTGCTCCTGTACTTGTCCTCAG |
| 1220 | EDG1 | 0.33 | TGCCTGCTCCTGTACTTGTCCTCAG |
| 1221 | ICAM2 | 0.46 | AAGCCTATACGTTTCTGTGGAGTAA |
| 1222 | PTPN7 | 0.33 | TCCTCCATCACCTGAAACACTGGAC |
| 1223 | CXorf9 | 0.35 | AAGCCTATACGTTTCTGTGGAGTAA |
| 1224 | RHOH | 0.31 | CACCCAGCTGGTCCTGTGGATGGGA |
| 1225 | MX2 | 0.32 | AAATGTTTCCTTGTGCCTGCTCCTG |
| 1226 | ZNFN1A1 | 0.31 | TCCTCCATCACCTGAAACACTGGAC |
| 1227 | COCH | 0.33 | TGGACCCCACTGGCTGAGAATCTGG |
| 1228 | LCP2 | 0.34 | TGGACCCCACTGGCTGAGAATCTGG |
| 1229 | CLGN | 0.31 | TCCTCCATCACCTGAAACACTGGAC |
| 1230 | BNC1 | 0.38 | GCCCCACTGGACAACACTGATTCCT |
| 1231 | FLNC | 0.3 | TCCTGTACTTGTCCTCAGCTTGGGC |
| 1232 | HLA-DRB3 | 0.32 | TGCCTGCTCCTGTACTTGTCCTCAG |
| 1233 | UCP2 | 0.34 | TGGACCCCACTGGCTGAGAATCTGG |
| 1234 | HLA-DRB1 | 0.3 | GCCCCACTGGACAACACTGATTCCT |
| 1235 | GATA3 | 0.37 | TCCTTGTGCCTGCTCCTGTACTTGT |
| 1236 | PRKCQ | 0.39 | AAATGTTTCCTTGTGCCTGCTCCTG |
| 1237 | SH2D1A | 0.37 | ACTTGTCCTCAGCTTGGGCTTCTTC |
| 1238 | NFATC3 | 0.33 | ACTTGTCCTCAGCTTGGGCTTCTTC |
| 1239 | TRB@ | 0.35 | AAATGTTTCCTTGTGCCTGCTCCTG |
| 1240 | FNBP1 | 0.34 | TCCTCCATCACCTGAAACACTGGAC |
| 1241 | SEPT6 | 0.33 | ACTTGTCCTCAGCTTGGGCTTCTTC |
| 1242 | NME4 | 0.32 | AAGCCTATACGTTTCTGTGGAGTAA |
| 1243 | DKFZP434C171 | 0.3 | TCCTTGTGCCTGCTCCTGTACTTGT |
| 1244 | ZC3HAV1 | 0.32 | TCCTGTACTTGTCCTCAGCTTGGGC |
| 1245 | SLC43A3 | 0.37 | AAATGTTTCCTTGTGCCTGCTCCTG |
| 1246 | CD3D | 0.31 | AAATGTTTCCTTGTGCCTGCTCCTG |
| 1247 | AIF1 | 0.35 | TCCTCCATCACCTGAAACACTGGAC |
| 1248 | SPTAN1 | 0.34 | TCCTCCATCACCTGAAACACTGGAC |
| 1249 | CD1E | 0.31 | TCCTTGTGCCTGCTCCTGTACTTGT |
| 1250 | TRIM | 0.31 | AAGCCTATACGTTTCTGTGGAGTAA |
| 1251 | DATF1 | 0.31 | TCCTTGTGCCTGCTCCTGTACTTGT |
| 1252 | FHOD1 | 0.37 | TCCTGTACTTGTCCTCAGCTTGGGC |
| 1253 | ARHGAP15 | 0.3 | CACCCAGCTGGTCCTGTGGATGGGA |
| 1254 | STAG3 | 0.34 | AAGCCTATACGTTTCTGTGGAGTAA |
| 1255 | SAP130 | 0.31 | TCCTGTACTTGTCCTCAGCTTGGGC |
| 1256 | CYLD | 0.3 | ACTTGTCCTCAGCTTGGGCTTCTTC |

TABLE 57
Vinblastine biomarkers.

| | | | |
|---|---|---|---|
| SEQ | | | |
| ID | | Corre- | |
| NO | Gene | lation | Medianprobe |

| | | | |
|---|---|---|---|
| 1257 | CD99 | 0.33 | ACTTGTCCTCAGCTTGGGCTTCTTC |

TABLE 58
Busulfan biomarkers.

| | | | |
|---|---|---|---|
| SEQ | | | |
| ID | | Corre- | |
| NO | Gene | lation | Medianprobe |

| | | | |
|---|---|---|---|
| 1258 | RPLP2 | 0.37 | TCCTCCATCACCTGAAACACTGGAC |
| 1259 | BTG1 | 0.36 | ACTTGTCCTCAGCTTGGGCTTCTTC |
| 1260 | CSDA | 0.31 | TGCCTGCTCCTGTACTTGTCCTCAG |
| 1261 | ARHGDIB | 0.38 | AAGCCTATACGTTTCTGTGGAGTAA |
| 1262 | INSIG1 | 0.41 | TCCTCCATCACCTGAAACACTGGAC |
| 1263 | ALDOC | 0.36 | TTGGACATCTCTAGTGTAGCTGCCA |
| 1264 | WASPIP | 0.31 | TCCTCCATCACCTGAAACACTGGAC |
| 1265 | C1QR1 | 0.46 | TCCTGTACTTGTCCTCAGCTTGGGC |
| 1266 | EDEM1 | 0.36 | TGGACCCCACTGGCTGAGAATCTGG |
| 1267 | SLA | 0.35 | TCCTTGTGCCTGCTCCTGTACTTGT |
| 1268 | MFNG | 0.4 | TCCTTGTGCCTGCTCCTGTACTTGT |
| 1269 | GPSM3 | 0.75 | GCCCCACTGGACAACACTGATTCCT |
| 1270 | ADA | 0.53 | ACTTGTCCTCAGCTTGGGCTTCTTC |
| 1271 | LRMP | 0.31 | TCCTGTACTTGTCCTCAGCTTGGGC |
| 1272 | EVI2A | 0.52 | TCCTCCATCACCTGAAACACTGGAC |
| 1273 | FMNL1 | 0.45 | ACTTGTCCTCAGCTTGGGCTTCTTC |
| 1274 | PTPN7 | 0.3 | ACTTGTCCTCAGCTTGGGCTTCTTC |
| 1275 | RHOH | 0.39 | ACTTGTCCTCAGCTTGGGCTTCTTC |
| 1276 | ZNFN1A1 | 0.36 | AAGCCTATACGTTTCTGTGGAGTAA |
| 1277 | CENTB1 | 0.33 | TTGGACATCTCTAGTGTAGCTGCCA |
| 1278 | MAP4K1 | 0.31 | TGGACCCCACTGGCTGAGAATCTGG |
| 1279 | CD28 | 0.51 | TCCTGTACTTGTCCTCAGCTTGGGC |
| 1280 | SP110 | 0.38 | TCCTTGTGCCTGCTCCTGTACTTGT |
| 1281 | NAP1L1 | 0.31 | TGCCTGCTCCTGTACTTGTCCTCAG |
| 1282 | IFI16 | 0.35 | TCCTCCATCACCTGAAACACTGGAC |
| 1283 | ARHGEF6 | 0.42 | AAATGTTTCCTTGTGCCTGCTCCTG |
| 1284 | SELPLG | 0.45 | TCCTGTACTTGTCCTCAGCTTGGGC |
| 1285 | CD3Z | 0.35 | CACCCAGCTGGTCCTGTGGATGGGA |
| 1286 | SH2D1A | 0.38 | CACCCAGCTGGTCCTGTGGATGGGA |
| 1287 | LAIR1 | 0.34 | TGCCTGCTCCTGTACTTGTCCTCAG |
| 1288 | RAFTLIN | 0.36 | GCCCCACTGGACAACACTGATTCCT |
| 1289 | HA-1 | 0.61 | ACTTGTCCTCAGCTTGGGCTTCTTC |
| 1290 | DOCK2 | 0.4 | TGCCTGCTCCTGTACTTGTCCTCAG |
| 1291 | CD3D | 0.31 | GCCCCACTGGACAACACTGATTCCT |
| 1292 | T3JAM | 0.35 | ACTTGTCCTCAGCTTGGGCTTCTTC |
| 1293 | ZAP70 | 0.36 | TGGACCCCACTGGCTGAGAATCTGG |
| 1294 | GPR65 | 0.32 | TCCTCCATCACCTGAAACACTGGAC |
| 1295 | CYFIP2 | 0.58 | CACCCAGCTGGTCCTGTGGATGGGA |
| 1296 | LPXN | 0.34 | TTGGACATCTCTAGTGTAGCTGCCA |
| 1297 | RPL10L | 0.41 | TCCTGTACTTGTCCTCAGCTTGGGC |
| 1298 | GLTSCR2 | 0.33 | AAATGTTTCCTTGTGCCTGCTCCTG |
| 1299 | ARHGAP15 | 0.47 | CACCCAGCTGGTCCTGTGGATGGGA |
| 1300 | BCL11B | 0.31 | TGCCTGCTCCTGTACTTGTCCTCAG |
| 1301 | TM6SF1 | 0.39 | AAGCCTATACGTTTCTGTGGAGTAA |
| 1302 | PACAP | 0.33 | ACTTGTCCTCAGCTTGGGCTTCTTC |
| 1303 | TCF4 | 0.32 | TGGACCCCACTGGCTGAGAATCTGG |

TABLE 59
Dacarbazine biomarkers.

| | | | |
|---|---|---|---|
| SEQ | | | |
| ID | | Corre- | |
| NO | Gene | lation | Medianprobe |

| | | | |
|---|---|---|---|
| 1304 | ARHGDIB | 0.31 | TCCTTGTGCCTGCTCCTGTACTTGT |
| 1305 | ITM2A | 0.4 | TCCTCCATCACCTGAAACACTGGAC |
| 1306 | SSBP2 | 0.33 | CACCCAGCTGGTCCTGTGGATGGGA |
| 1307 | PIM2 | 0.39 | GCCCCACTGGACAACACTGATTCCT |
| 1308 | SELL | 0.31 | GCCCCACTGGACAACACTGATTCCT |
| 1309 | ICAM2 | 0.43 | TCCTGTACTTGTCCTCAGCTTGGGC |
| 1310 | EVI2A | 0.32 | AAGCCTATACGTTTCTGTGGAGTAA |
| 1311 | MAL | 0.32 | TTGGACATCTCTAGTGTAGCTGCCA |
| 1312 | PTPN7 | 0.34 | ACTTGTCCTCAGCTTGGGCTTCTTC |
| 1313 | ZNFN1A1 | 0.32 | TCCTTGTGCCTGCTCCTGTACTTGT |
| 1314 | LCP2 | 0.3 | GCCCCACTGGACAACACTGATTCCT |
| 1315 | ARHGAP6 | 0.33 | TGGACCCCACTGGCTGAGAATCTGG |
| 1316 | CD28 | 0.33 | ACTTGTCCTCAGCTTGGGCTTCTTC |
| 1317 | CD8B1 | 0.32 | TCCTCCATCACCTGAAACACTGGAC |
| 1318 | LCP1 | 0.34 | TCCTTGTGCCTGCTCCTGTACTTGT |
| 1319 | NPD014 | 0.31 | TGCCTGCTCCTGTACTTGTCCTCAG |
| 1320 | CD69 | 0.32 | AAGCCTATACGTTTCTGTGGAGTAA |
| 1321 | NFATC3 | 0.32 | AAGCCTATACGTTTCTGTGGAGTAA |
| 1322 | TRB@ | 0.32 | AAATGTTTCCTTGTGCCTGCTCCTG |
| 1323 | IGJ | 0.33 | AAGCCTATACGTTTCTGTGGAGTAA |
| 1324 | SLC43A3 | 0.3 | TTGGACATCTCTAGTGTAGCTGCCA |
| 1325 | DOCK2 | 0.36 | TCCTCCATCACCTGAAACACTGGAC |
| 1326 | FHOD1 | 0.33 | TGGACCCCACTGGCTGAGAATCTGG |
| 1327 | PACAP | 0.31 | AAGCCTATACGTTTCTGTGGAGTAA |

TABLE 60
Oxaliplatin biomarkers.

| | | | |
|---|---|---|---|
| SEQ | | | |
| ID | | Corre- | |
| NO | Gene | lation | Medianprobe |

| | | | |
|---|---|---|---|
| 1328 | RPL18 | 0.38 | TTGGACATCTCTAGTGTAGCTGCCA |
| 1329 | RPL10A | 0.32 | AAATGTTTCCTTGTGCCTGCTCCTG |
| 1330 | RPS3A | 0.34 | TGGACCCCACTGGCTGAGAATCTGG |
| 1331 | EEF1B2 | 0.39 | CACCCAGCTGGTCCTGTGGATGGGA |
| 1332 | GOT2 | 0.32 | AAGCCTATACGTTTCTGTGGAGTAA |
| 1333 | RPL13A | 0.33 | AAATGTTTCCTTGTGCCTGCTCCTG |
| 1334 | RPS15 | 0.41 | GCCCCACTGGACAACACTGATTCCT |
| 1335 | NOLSA | 0.37 | TGCCTGCTCCTGTACTTGTCCTCAG |
| 1336 | RPLP2 | 0.36 | TGCCTGCTCCTGTACTTGTCCTCAG |
| 1337 | SLC9A3R1 | 0.43 | TGGACCCCACTGGCTGAGAATCTGG |
| 1338 | E1F3S3 | 0.43 | GCCCCACTGGACAACACTGATTCCT |
| 1339 | MTHFD2 | 0.33 | TGCCTGCTCCTGTACTTGTCCTCAG |
| 1340 | IMPDH2 | 0.34 | ACTTGTCCTCAGCTTGGGCTTCTTC |
| 1341 | ALDOC | 0.44 | TGCCTGCTCCTGTACTTGTCCTCAG |
| 1342 | FABP5 | 0.33 | CACCCAGCTGGTCCTGTGGATGGGA |
| 1343 | ITM2A | 0.35 | TCCTTGTGCCTGCTCCTGTACTTGT |
| 1344 | PCK2 | 0.36 | ACTTGTCCTCAGCTTGGGCTTCTTC |
| 1345 | MFNG | 0.33 | GCCCCACTGGACAACACTGATTCCT |
| 1346 | GCH1 | 0.37 | TGGACCCCACTGGCTGAGAATCTGG |
| 1347 | PIM2 | 0.39 | CACCCAGCTGGTCCTGTGGATGGGA |
| 1348 | ADA | 0.32 | TCCTTGTGCCTGCTCCTGTACTTGT |
| 1349 | ICAM2 | 0.31 | TCCTCCATCACCTGAAACACTGGAC |
| 1350 | TTF1 | 0.47 | TTGGACATCTCTAGTGTAGCTGCCA |
| 1351 | MYB | 0.36 | TGCCTGCTCCTGTACTTGTCCTCAG |
| 1352 | PTPN7 | 0.37 | CACCCAGCTGGTCCTGTGGATGGGA |
| 1353 | RHOH | 0.42 | TCCTCCATCACCTGAAACACTGGAC |
| 1354 | ZNFN1A1 | 0.39 | ACTTGTCCTCAGCTTGGGCTTCTTC |
| 1355 | PRIM1 | 0.36 | TCCTTGTGCCTGCTCCTGTACTTGT |
| 1356 | FHIT | 0.48 | TCCTCCATCACCTGAAACACTGGAC |
| 1357 | ASS | 0.45 | TGGACCCCACTGGCTGAGAATCTGG |
| 1358 | SYK | 0.31 | TGCCTGCTCCTGTACTTGTCCTCAG |
| 1359 | OXA1L | 0.32 | TTGGACATCTCTAGTGTAGCTGCCA |
| 1360 | LCP1 | 0.31 | TGCCTGCTCCTGTACTTGTCCTCAG |
| 1361 | DDX18 | 0.32 | AAGCCTATACGTTTCTGTGGAGTAA |
| 1362 | NOLA2 | 0.35 | AAATGTTTCCTTGTGCCTGCTCCTG |
| 1363 | KIAA0922 | 0.41 | TCCTCCATCACCTGAAACACTGGAC |
| 1364 | PRKCQ | 0.34 | TCCTTGTGCCTGCTCCTGTACTTGT |
| 1365 | NFATC3 | 0.32 | TCCTGTACTTGTCCTCAGCTTGGGC |
| 1366 | ANAPC5 | 0.34 | TCCTCCATCACCTGAAACACTGGAC |
| 1367 | TRB@ | 0.4 | TGGACCCCACTGGCTGAGAATCTGG |
| 1368 | CXCR4 | 0.32 | TCCTTGTGCCTGCTCCTGTACTTGT |
| 1369 | FNBP4 | 0.3 | TCCTGTACTTGTCCTCAGCTTGGGC |
| 1370 | SEPT6 | 0.53 | TTGGACATCTCTAGTGTAGCTGCCA |
| 1371 | RPS2 | 0.35 | TCCTCCATCACCTGAAACACTGGAC |
| 1372 | MDN1 | 0.41 | ACTTGTCCTCAGCTTGGGCTTCTTC |
| 1373 | PCCB | 0.32 | AAGCCTATACGTTTCTGTGGAGTAA |
| 1374 | RASA4 | 0.33 | TGGACCCCACTGGCTGAGAATCTGG |
| 1375 | WBSCR20C | 0.31 | CACCCAGCTGGTCCTGTGGATGGGA |
| 1376 | SFRS7 | 0.32 | TTGGACATCTCTAGTGTAGCTGCCA |
| 1377 | WBSCR20A | 0.3 | TGCCTGCTCCTGTACTTGTCCTCAG |
| 1378 | NUP210 | 0.43 | TGGACCCCACTGGCTGAGAATCTGG |
| 1379 | SHMT2 | 0.36 | TCCTTGTGCCTGCTCCTGTACTTGT |
| 1380 | RPLP0 | 0.33 | TTGGACATCTCTAGTGTAGCTGCCA |
| 1381 | MAP4K1 | 0.31 | CACCCAGCTGGTCCTGTGGATGGGA |
| 1382 | HNRPA1 | 0.37 | TCCTCCATCACCTGAAACACTGGAC |
| 1383 | CYFIP2 | 0.3 | GCCCCACTGGACAACACTGATTCCT |
| 1384 | RPL10L | 0.32 | TCGTCCATCACCTGAAACACTGGAC |
| 1385 | GLTSCR2 | 0.39 | TGGACCCCACTGGCTGAGAATCTGG |
| 1386 | MRPL16 | 0.38 | TCCTGTACTTGTCCTCAGCTTGGGC |
| 1387 | MRPS2 | 0.34 | GCCCCACTGGACAACACTGATTCCT |
| 1388 | FLJ12270 | 0.31 | AAGCCTATACGTTTCTGTGGAGTAA |
| 1389 | CDK5RAP3 | 0.32 | TTGGACATCTCTAGTGTAGCTGCCA |
| 1390 | ARHGAP15 | 0.32 | TCCTGTACTTGTCCTCAGCTTGGGC |
| 1391 | CUTC | 0.33 | TCCTTGTGCCTGCTCCTGTACTTGT |
| 1392 | FKBP11 | 0.32 | ACTTGTCCTCAGCTTGGGCTTCTTC |
| 1393 | ADPGK | 0.41 | AAGCCTATACGTTTCTGTGGAGTAA |
| 1394 | FLJ22457 | 0.32 | GCCCCACTGGACAACACTGATTCCT |
| 1395 | PUS3 | 0.31 | TCCTTGTGCCTGCTCCTGTACTTGT |
| 1396 | PACAP | 0.36 | TGCCTGCTCCTGTACTTGTCCTCAG |
| 1397 | CALML4 | 0.31 | TCCTGTACTTGTCCTCAGCTTGGGC |

TABLE 61
Hydroxyurea biomarkers.

| | | | |
|---|---|---|---|
| SEQ | | | |
| ID | | Corre- | |
| NO | Gene | lation | Medianprobe |

| | | | |
|---|---|---|---|
| 1398 | CSDA | 0.31 | TCCTCCATCACCTGAAACACTGGAC |
| 1399 | INSIG1 | 0.38 | AAGCCTATACGTTTCTGTGGAGTAA |
| 1400 | UBE2L6 | 0.33 | CACCCAGCTGGTCCTGTGGATGGGA |
| 1401 | PRG1 | 0.36 | GCCCCACTGGACAACACTGATTCCT |
| 1402 | ITM2A | 0.3 | ACTTGTCCTCAGCTTGGGCTTCTTC |
| 1403 | DGKA | 0.31 | CACCCAGCTGGTCCTGTGGATGGGA |
| 1404 | SLA | 0.47 | CACCCAGCTGGTCCTGTGGATGGGA |
| 1405 | PCBP2 | 0.51 | TGGACCCCACTGGCTGAGAATCTGG |
| 1406 | IL2RG | 0.42 | ACTTGTCCTCAGCTTGGGCTTCTTC |
| 1407 | ALOX5AP | 0.31 | AAGCCTATACGTTTCTGTGGAGTAA |
| 1408 | PSMB9 | 0.33 | GCCCCACTGGACAACACTGATTCCT |
| 1409 | LRMP | 0.36 | TTGGACATCTCTAGTGTAGCTGCCA |
| 1410 | ICAM2 | 0.31 | TGGACCCCACTGGCTGAGAATCTGG |
| 1411 | PTPN7 | 0.36 | TCCTCCATCACCTGAAACACTGGAC |
| 1412 | CXorf9 | 0.38 | TCCTTGTGCCTGCTCCTGTACTTGT |
| 1413 | RHOH | 0.41 | TGCCTGCTCCTGTACTTGTCCTCAG |
| 1414 | ZNFN1A1 | 0.31 | AAATGTTTCCTTGTGCCTGCTCCTG |
| 1415 | CENTB1 | 0.36 | TTGGACATCTCTAGTGTAGCTGCCA |
| 1416 | LCP2 | 0.37 | CACCCAGCTGGTCCTGTGGATGGGA |
| 1417 | STAT4 | 0.32 | GCCCCACTGGACAACACTGATTCCT |
| 1418 | CCR7 | 0.31 | TCCTTGTGCCTGCTCCTGTACTTGT |
| 1419 | CD3G | 0.33 | AAATGTTTCCTTGTGCCTGCTCCTG |
| 1420 | SP110 | 0.32 | TCCTGTACTTGTCCTCAGCTTGGGC |
| 1421 | TNFAIP8 | 0.31 | TCCTCCATCACCTGAAACACTGGAC |
| 1422 | IFI16 | 0.4 | TGGACCCCACTGGCTGAGAATCTGG |
| 1423 | CXCR4 | 0.37 | ACTTGTCCTCAGCTTGGGCTTCTTC |
| 1424 | ARHGEF6 | 0.37 | TTGGACATCTCTAGTGTAGCTGCCA |
| 1425 | SELPLG | 0.3 | TCCTCCATCACCTGAAACACTGGAC |
| 1426 | CD3Z | 0.38 | TCCTCCATCACCTGAAACACTGGAC |
| 1427 | PRKCQ | 0.3 | TGCCTGCTCCTGTACTTGTCCTCAG |
| 1428 | SH2D1A | 0.3 | TCCTTGTGCCTGCTCCTGTACTTGT |
| 1429 | CD1A | 0.31 | TTGGACATCTCTAGTGTAGCTGCCA |
| 1430 | NFATC3 | 0.33 | TGGACCCCACTGGCTGAGAATCTGG |
| 1431 | LAIR1 | 0.34 | TCCTCCATCACCTGAAACACTGGAC |
| 1432 | TRB@ | 0.3 | CACCCAGCTGGTCCTGTGGATGGGA |
| 1433 | SEPT6 | 0.34 | CAGCCAGCTGGTCCTGTGGATGGGA |
| 1434 | RAFTLIN | 0.3 | TCCTTGTGCCTGCTCCTGTACTTGT |
| 1435 | DOCK2 | 0.32 | TGGACCCCACTGGCTGAGAATCTGG |
| 1436 | CD3D | 0.37 | TGCCTGCTCCTGTACTTGTCCTCAG |
| 1437 | CD6 | 0.42 | AAGCCTATACGTTTCTGTGGAGTAA |
| 1438 | AIF1 | 0.4 | TGCCTGCTCCTGTACTTGTCCTCAG |
| 1439 | CD1E | 0.41 | GCCCCACTGGACAACACTGATTCCT |
| 1440 | CYFIP2 | 0.35 | TCCTGTACTTGTCCTCAGCTTGGGC |
| 1441 | TARP | 0.38 | AAATGTTTCCTTGTGCCTGCTCCTG |
| 1442 | ADA | 0.33 | AAGCCTATACGTTTCTGTGGAGTAA |
| 1443 | ARHGAP15 | 0.32 | TGGACCCCACTGGCTGAGAATCTGG |
| 1444 | GIMAP6 | 0.34 | GCCCCACTGGACAACACTGATTCCT |
| 1445 | STAG3 | 0.31 | ACTTGTCCTCAGCTTGGGCTTCTTC |
| 1446 | FLJ22457 | 0.31 | AAGCCTATACGTTTCTGTGGAGTAA |
| 1447 | PACAP | 0.35 | AAGCCTATACGTTTCTGTGGAGTAA |
| 1448 | TCF4 | 0.4 | TCCTGTACTTGTCCTCAGCTTGGGC |

TABLE 62
Tegafur biomarkers.

| | | | |
|---|---|---|---|
| SEQ | | | |
| ID | | Corre- | |
| NO | Gene | lation | Medianprobe |

| | | | |
|---|---|---|---|
| 1449 | RPL11 | 0.31 | GCCCCACTGGACAACACTGATTCCT |
| 1450 | RPL17 | 0.38 | TGCCTGCTCCTGTACTTGTCCTCAG |
| 1451 | ANAPC5 | 0.34 | CACCCAGCTGGTCCTGTGGATGGGA |
| 1452 | RPL13A | 0.34 | TCCTGTACTTGTCCTCAGCTTGGGC |
| 1453 | STOM | 0.37 | TCCTCCATCACCTGAAACACTGGAC |
| 1454 | TUFM | 0.38 | GCCCCACTGGACAACACTGATTCCT |
| 1455 | SCARB1 | 0.35 | TCCTGTACTTGTCCTCAGCTTGGGC |
| 1456 | FABP5 | 0.33 | CACCCAGCTGGTCCTGTGGATGGGA |
| 1457 | KIAA0711 | 0.35 | TCCTTGTGCCTGCTCCTGTACTTGT |
| 1458 | ILGR | 0.33 | TCCTCCATCACCTGAAACACTGGAC |
| 1459 | WBSCR22 | 0.3 | AAATGTTTCCTTGTGCCTGCTCCTG |
| 1460 | UCK2 | 0.4 | TGCCTGCTCCTGTACTTGTCCTCAG |
| 1461 | GZMB | 0.3 | AAGCCTATACGTTTCTGTGGAGTAA |
| 1462 | Clorf38 | 0.32 | CACCCAGCTGGTCCTGTGGATGGGA |
| 1463 | PCBP2 | 0.31 | TCCTGTACTTGTCCTCAGCTTGGGC |
| 1464 | GPR65 | 0.44 | TGCCTGCTCCTGTACTTGTCCTCAG |
| 1465 | GLTSCR2 | 0.38 | TCCTTGTGCCTGCTCCTGTACTTGT |
| 1466 | FKBP11 | 0.38 | TGGACCCCACTGGCTGAGAATCTGG |

TABLE 63
Daunorubicin biomarkers.

| | | | |
|---|---|---|---|
| SEQ | | | |
| ID | | Corre- | |
| NO | Gene | lation | Medianprobe |

| | | | |
|---|---|---|---|
| 1467 | ALDOC | 0.41 | TGCCTGCTCCTGTACTTGTCCTCAG |
| 1468 | ITM2A | 0.32 | GCCCCACTGGACAACACTGATTCCT |
| 1469 | SLA | 0.41 | TCCTTGTGCCTGCTCCTGTACTTGT |
| 1470 | SSBP2 | 0.31 | TCCTTGTGCCTGCTCCTGTACTTGT |
| 1471 | IL2RG | 0.31 | TGGACCCCACTGGCTGAGAATCTGG |
| 1472 | MFNG | 0.47 | TTGGACATCTCTAGTGTAGCTGCCA |
| 1473 | SELL | 0.33 | TCCTCCATCACCTGAAACACTGGAC |
| 1474 | STC1 | 0.31 | AAATGTTTCCTTGTGCCTGCTCCTG |
| 1475 | LRMP | 0.33 | AAGCCTATACGTTTCTGTGGAGTAA |
| 1476 | MYB | 0.41 | GCCCCACTGGACAACACTGATTCCT |
| 1477 | PTPN7 | 0.31 | AAATGTTTCCTTGTGCCTGCTCCTG |
| 1478 | CXorf9 | 0.38 | TGGACCCCACTGGCTGAGAATCTGG |
| 1479 | RHOH | 0.32 | AAATGTTTCCTTGTGCCTGCTCCTG |
| 1480 | ZNFN1A1 | 0.36 | CACCCAGCTGGTCCTGTGGATGGGA |
| 1481 | CENTB1 | 0.37 | TGGACCCCACTGGCTGAGAATCTGG |
| 1482 | MAP4K1 | 0.32 | TGGACCCCACTGGCTGAGAATCTGG |
| 1483 | CCR7 | 0.3 | TCCTGTACTTGTCCTCAGCTTGGGC |
| 1484 | CD3G | 0.33 | AAATGTTTCCTTGTGCCTGCTCCTG |
| 1485 | CCR9 | 0.33 | TGGACCCCACTGGCTGAGAATCTGG |
| 1486 | CBFA2T3 | 0.31 | CACCCAGCTGGTCCTGTGGATGGGA |
| 1487 | CXGR4 | 0.41 | AAATGTTTCCTTGTGCCTGCTCCTG |
| 1488 | ARHGEF6 | 0.4 | TCCTGTACTTGTCCTCAGCTTGGGC |
| 1489 | SELPLG | 0.45 | TCCTTGTGCCTGCTCCTGTACTTGT |
| 1490 | SEC31L2 | 0.38 | TCCTGTACTTGTCCTCAGCTTGGGC |
| 1491 | CD3Z | 0.33 | CACCCAGCTGGTCCTGTGGATGGGA |
| 1492 | SH2D1A | 0.33 | TCCTGTACTTGTCCTCAGCTTGGGC |
| 1493 | CD1A | 0.35 | TGGACCCCACTGGCTGAGAATCTGG |
| 1494 | SCN3A | 0.33 | CACCCAGCTGGTCCTGTGGATGGGA |
| 1495 | LAIR1 | 0.33 | TGCCTGCTCCTGTACTTGTCCTCAG |
| 1496 | TRB@ | 0.3 | AAATGTTTCCTTGTGCCTGCTCCTG |
| 1497 | DOCK2 | 0.35 | AAGCCTATACGTTTCTGTGGAGTAA |
| 1498 | WBSCR20C | 0.38 | CACCCAGCTGGTCCTGTGGATGGGA |
| 1499 | CD3D | 0.32 | TGCCTGCTCCTGTACTTGTCCTCAG |
| 1500 | T3JAM | 0.34 | CACCCAGCTGGTCCTGTGGATGGGA |
| 1501 | CD6 | 0.33 | ACTTGTCCTCAGCTTGGGCTTCTTC |
| 1502 | ZAP70 | 0.32 | TGCCTGCTCCTGTACTTGTCCTCAG |
| 1503 | GPR65 | 0.33 | TCCTGTACTTGTCCTCAGCTTGGGC |
| 1504 | AIF1 | 0.3 | GCCCCACTGGACAACACTGATTCCT |
| 1505 | WDR45 | 0.3 | TCCTCCATCACCTGAAACACTGGAC |
| 1506 | CD1E | 0.3 | TCCTTGTGCCTGCTCCTGTACTTGT |
| 1507 | CYFIP2 | 0.39 | AAGCCTATACGTTTCTGTGGAGTAA |
| 1508 | TARP | 0.38 | TTGGACATCTCTAGTGTAGCTGCCA |
| 1509 | TRIM | 0.34 | TCCTGTACTTGTCCTCAGCTTGGGC |
| 1510 | ARHGAP15 | 0.37 | ACTTGTCCTCAGCTTGGGCTTCTTC |
| 1511 | NOTCH1 | 0.39 | AAGCCTATACGTTTCTGTGGAGTAA |
| 1512 | STAG3 | 0.35 | AAGCCTATACGTTTCTGTGGAGTAA |
| 1513 | UBASH3A | 0.31 | TGCCTGCTCCTGTACTTGTCCTCAG |
| 1514 | MGC5566 | 0.33 | TGCCTGCTCCTGTACTTGTCCTCAG |
| 1515 | PACAP | 0.33 | TCCTTGTGCCTGCTCCTGTACTTGT |

TABLE 64
Bleomycin biomarkers.

| | | | |
|---|---|---|---|
| SEQ | | | |
| ID | | Corre- | |
| NO | Gene | lation | Medianprobe |

| | | | |
|---|---|---|---|
| 1516 | PFN1 | 0.32 | CACCCAGCTGGTCCTGTGGATGGGA |
| 1517 | CALU | 0.32 | ACTTGTCCTCAGCTTGGGCTTCTTC |
| 1518 | ZYX | 0.34 | CACCCAGCTGGTCCTGTGGATGGGA |
| 1519 | PSMD2 | 0.36 | GCCCCACTGGACAACACTGATTCCT |
| 1520 | RAP1B | 0.32 | TCCTGTACTTGTCCTCAGCTTGGGC |
| 1521 | EPAS1 | 0.35 | TCCTGTACTTGTCCTCAGCTTGGGC |
| 1522 | PGAM1 | 0.36 | GCCCCACTGGACAACACTGATTCCT |
| 1523 | STAT1 | 0.38 | TGCCTGCTCCTGTACTTGTCCTCAG |
| 1524 | CKAP4 | 0.38 | GCCCCACTGGACAACACTGATTCCT |
| 1525 | DUSP1 | 0.32 | TCCTGTACTTGTCCTCAGCTTGGGC |
| 1526 | RCN1 | 0.32 | TCCTCCATCACCTGAAACACTGGAC |
| 1527 | UCHL1 | 0.44 | TGGACCCCACTGGCTGAGAATCTGG |
| 1528 | ITGA5 | 0.33 | AAATGTTTCCTTGTGCCTGCTCCTG |
| 1529 | NFKBIA | 0.32 | TGCCTGCTCCTGTACTTGTCCTCAG |
| 1530 | LAMB1 | 0.4 | GCCCCACTGGACAACACTGATTCCT |
| 1531 | TGFBI | 0.37 | TTGGACATCTCTAGTGTAGCTGCCA |
| 1532 | FHL1 | 0.31 | GCCCCACTGGACAACACTGATTCCT |
| 1533 | GJA1 | 0.32 | TCCTCCATCACCTGAAACACTGGAC |
| 1534 | PRG1 | 0.33 | CACCCAGCTGGTCCTGTGGATGGGA |
| 1535 | EXT1 | 0.35 | CACCCAGCTGGTCCTGTGGATGGGA |
| 1536 | MVP | 0.32 | TCCTGTACTTGTCCTCAGCTTGGGC |
| 1537 | NNMT | 0.38 | TGGACCCCACTGGCTGAGAATCTGG |
| 1538 | TAP1 | 0.37 | TCCTCCATCACCTGAAACACTGGAC |
| 1539 | CRIM1 | 0.41 | TGGACCCCACTGGCTGAGAATCTGG |
| 1540 | PLOD2 | 0.36 | GCCCCACTGGACAACACTGATTCCT |
| 1541 | RPS19 | 0.34 | TCCTGTACTTGTCCTCAGCTTGGGC |
| 1542 | AXL | 0.43 | GCCCCACTGGACAACACTGATTCCT |
| 1543 | PALM2-AKAP2 | 0.42 | TCCTCCATCACCTGAAACACTGGAC |
| 1544 | IL8 | 0.32 | TCCTGTACTTGTCCTCAGCTTGGGC |
| 1545 | LOXL2 | 0.3 | TGCCTGCTCCTGTACTTGTCCTCAG |
| 1546 | PAPSS2 | 0.31 | CACCCAGCTGGTCCTGTGGATGGGA |
| 1547 | CAV1 | 0.31 | TCCTTGTGCCTGCTCCTGTACTTGT |
| 1548 | F2R | 0.32 | ACTTGTCCTCAGCTTGGGCTTCTTC |
| 1549 | PSMB9 | 0.38 | CACCCAGCTGGTCCTGTGGATGGGA |
| 1550 | LOX | 0.36 | TGGACCCCACTGGCTGAGAATCTGG |
| 1551 | Clorf29 | 0.36 | TCCTGTACTTGTCCTCAGCTTGGGC |
| 1552 | STC1 | 0.32 | TTGGACATCTCTAGTGTAGCTGCCA |
| 1553 | LIF | 0.34 | TCCTTGTGCCTGCTCCTGTACTTGT |
| 1554 | KCNJ8 | 0.46 | GCCCCACTGGACAACACTGATTCCT |
| 1555 | SMAD3 | 0.32 | TGCCTGCTCCTGTACTTGTCCTCAG |
| 1556 | HPCAL1 | 0.45 | AAATGTTTCCTTGTGCCTGCTCCTG |
| 1557 | WNT5A | 0.34 | TCCTTGTGCCTGCTCCTGTACTTGT |
| 1558 | BDNF | 0.33 | TGCCTGCTCCTGTACTTGTCCTCAG |
| 1559 | TNFRSF1A | 0.38 | TCCTGTACTTGTCCTCAGCTTGGGC |
| 1560 | NCOR2 | 0.45 | CACCCAGCTGGTCCTGTGGATGGGA |
| 1561 | FLNC | 0.44 | TTGGACATCTCTAGTGTAGCTGCCA |
| 1562 | HMGA2 | 0.41 | AAATGTTTCCTTGTGCCTGCTCCTG |
| 1563 | HLA-B | 0.42 | AAGCCTATACGTTTCTGTGGAGTAA |
| 1564 | FLOT1 | 0.3 | AAATGTTTCCTTGTGCCTGCTCCTG |
| 1565 | PTRF | 0.36 | CACCCAGCTGGTCCTGTGGATGGGA |
| 1566 | IFI16 | 0.32 | TCCTTGTGCCTGCTCCTGTACTTGT |
| 1567 | MGC4083 | 0.34 | TCCTCCATCACCTGAAACACTGGAC |
| 1568 | TNFRSF10B | 0.4 | ACTTGTCCTCAGCTTGGGCTTCTTC |
| 1569 | PNMA2 | 0.38 | TCCTGTACTTGTCCTCAGCTTGGGC |
| 1570 | TFPI | 0.32 | TCCTTGTGCCTGCTCCTGTACTTGT |
| 1571 | CLECSF2 | 0.33 | TGCCTGCTCCTGTACTTGTCCTCAG |
| 1572 | SP110 | 0.34 | GCCCCACTGGACAACACTGATTCCT |
| 1573 | PLAUR | 0.35 | ACTTGTCCTCAGCTTGGGCTTCTTC |
| 1574 | ASPH | 0.42 | TCCTTGTGCCTGCTCCTGTACTTGT |
| 1575 | FSCN1 | 0.38 | TGCCTGCTCCTGTACTTGTCCTCAG |
| 1576 | HIC | 0.46 | TCCTCCATCACCTGAAACACTGGAC |
| 1577 | HLA-C | 0.34 | TGGACCCCACTGGCTGAGAATCTGG |
| 1578 | COL6A1 | 0.34 | TCCTCCATCACCTGAAACACTGGAC |
| 1579 | IL6ST | 0.45 | AAATGTTTCCTTGTGCCTGCTCCTG |
| 1580 | IFITM3 | 0.36 | GCCCCACTGGACAACACTGATTCCT |
| 1581 | MAP1B | 0.31 | TCCTCCATCACCTGAAACACTGGAC |
| 1582 | FLJ46603 | 0.3 | ACTTGTCCTCAGCTTGGGCTTCTTC |
| 1583 | RAFTLIN | 0.32 | GCCCCACTGGACAACACTGATTCCT |
| 1584 | FTL | 0.37 | CACCCAGCTGGTCCTGTGGATGGGA |
| 1585 | KIAA0877 | 0.43 | TCCTCCATCACCTGAAACACTGGAC |
| 1586 | MT1E | 0.41 | TGGACCCCACTGGCTGAGAATCTGG |
| 1587 | CDC10 | 0.32 | TGCCTGCTCCTGTACTTGTCCTCAG |
| 1588 | ZNF258 | 0.31 | AAATGTTTCCTTGTGCCTGCTCCTG |
| 1589 | BCAT1 | 0.39 | TTGGACATCTCTAGTGTAGCTGCCA |
| 1590 | IFI44 | 0.36 | AAATGTTTCCTTGTGCCTGCTCCTG |
| 1591 | SOD2 | 0.36 | GCCCCACTGGACAACACTGATTCCT |
| 1592 | TMSB10 | 0.33 | TCCTCCATCACCTGAAACACTGGAC |
| 1593 | FLJ10350 | 0.3 | TTGGACATCTCTAGTGTAGCTGCCA |
| 1594 | Clorf24 | 0.34 | CACCCAGCTGGTCCTGTGGATGGGA |
| 1595 | EFHD2 | 0.36 | AAATGTTTCCTTGTGCCTGCTCCTG |
| 1596 | RPS27L | 0.33 | AAGCCTATACGTTTCTGTGGAGTAA |
| 1597 | TNFRSF12A | 0.43 | CACCCAGCTGGTCCTGTGGATGGGA |
| 1598 | FAD104 | 0.38 | TTGGACATCTCTAGTGTAGCTGCCA |
| 1599 | RAB7L1 | 0.58 | ACTTGTCCTCAGCTTGGGCTTCTTC |
| 1600 | NME7 | 0.36 | TTGGACATCTCTAGTGTAGCTGCCA |
| 1601 | TMEM22 | 0.34 | TTGGACATCTCTAGTGTAGCTGCCA |
| 1602 | TPK1 | 0.31 | GCCCCACTGGACAACACTGATTCCT |
| 1603 | ELK3 | 0.36 | TGGACCCCACTGGCTGAGAATCTGG |
| 1604 | CYLD | 0.3 | AAGCCTATACGTTTCTGTGGAGTAA |
| 1605 | AMIGO2 | 0.31 | ACTTGTCCTCAGCTTGGGCTTCTTC |
| 1606 | ADAMTS1 | 0.43 | ACTTGTCCTCAGCTTGGGCTTCTTC |
| 1607 | ACTB | 0.36 | ACTTGTCCTCAGCTTGGGCTTCTTC |

TABLE 65
Estramustine biomarkers.

| SEQ | | | |
|---|---|---|---|
| ID | | Corre- | |
| NO | Gene | lation | Medianprobe |
| 1608 | HSPCB | 0.31 | ACTTGTCCTCAGCTTGGGCTTCTTC |
| 1609 | LDHA | 0.42 | TGCCTGCTCCTGTACTTGTCCTCAG |
| 1610 | TM4SF7 | 0.32 | TCCTGTACTTGTCCTCAGCTTGGGC |

TABLE 66
Chlorambucil biomarkers.

| | | | |
|---|---|---|---|
| SEQ | | | |
| ID | | Corre- | |
| NO | Gene | lation | Medianprobe |

| | | | |
|---|---|---|---|
| 1611 | CSDA | 0.33 | TGGACCCCACTGGCTGAGAATCTGG |
| 1612 | INSIG1 | 0.32 | TCCTTGTGCCTGCTCCTGTACTTGT |
| 1613 | UBE2L6 | 0.39 | TGGACCCCACTGGCTGAGAATCTGG |
| 1614 | PRG1 | 0.37 | TCCTTGTGCCTGCTCCTGTACTTGT |
| 1615 | ITM2A | 0.3 | GCCCCACTGGACAACACTGATTCCT |
| 1616 | DGKA | 0.38 | TCCTTGTGCCTGCTCCTGTACTTGT |
| 1617 | TFDP2 | 0.32 | AAATGTTTCCTTGTGCCTGCTCCTG |
| 1618 | SLA | 0.32 | TCCTCCATCACCTGAAACACTGGAC |
| 1619 | IL2RG | 0.44 | AAGCCTATACGTTTCTGTGGAGTAA |
| 1620 | ALOX5AP | 0.45 | GCCCCACTGGACAACACTGATTCCT |
| 1621 | GPSM3 | 0.34 | TTGGACATCTCTAGTGTAGCTGCCA |
| 1622 | PSMB9 | 0.36 | ACTTGTCCTCAGCTTGGGCTTCTTC |
| 1623 | SELL | 0.42 | TGCCTGCTCCTGTACTTGTCCTCAG |
| 1624 | ADA | 0.35 | ACTTGTCCTCAGCTTGGGCTTCTTC |
| 1625 | EDG1 | 0.33 | AAATGTTTCCTTGTGCCTGCTCCTG |
| 1626 | FMNL1 | 0.3 | TCCTCCATCACCTGAAACACTGGAC |
| 1627 | PTPN7 | 0.5 | TCCTTGTGCCTGCTCCTGTACTTGT |
| 1628 | CXorf9 | 0.41 | TGGACCCCACTGGCTGAGAATCTGG |
| 1629 | RHOH | 0.35 | TTGGACATCTCTAGTGTAGCTGCCA |
| 1630 | ZNFN1A1 | 0.32 | TCCTTGTGCCTGCTCCTGTACTTGT |
| 1631 | CENTB1 | 0.47 | TCCTGTACTTGTCCTCAGCTTGGGC |
| 1632 | LCP2 | 0.37 | TCCTCCATCACCTGAAACACTGGAC |
| 1633 | CD1D | 0.36 | AAGCCTATACGTTTCTGTGGAGTAA |
| 1634 | STAT4 | 0.31 | AAATGTTTCCTTGTGCCTGCTCCTG |
| 1635 | VAV1 | 0.35 | AAATGTTTCCTTGTGCCTGCTCCTG |
| 1636 | MAP4K1 | 0.36 | TTGGACATCTCTAGTGTAGCTGCCA |
| 1637 | CCR7 | 0.31 | TCCTGTACTTGTCCTCAGCTTGGGC |
| 1638 | PDE4C | 0.42 | GCCCCACTGGACAACACTGATTCCT |
| 1639 | CD3G | 0.41 | AAGCCTATACGTTTCTGTGGAGTAA |
| 1640 | CCR9 | 0.43 | AAGCCTATACGTTTCTGTGGAGTAA |
| 1641 | SP110 | 0.43 | TTGGACATCTCTAGTGTAGCTGCCA |
| 1642 | TNFAIP8 | 0.48 | TTGGACATCTCTAGTGTAGCTGCCA |
| 1643 | LCP1 | 0.31 | AAATGTTTCCTTGTGCCTGCTCCTG |
| 1644 | IFI16 | 0.5 | TCCTCCATCACCTGAAACACTGGAC |
| 1645 | CXCR4 | 0.37 | ACTTGTCCTCAGCTTGGGCTTCTTC |
| 1646 | ARHGEF6 | 0.37 | ACTTGTCCTCAGCTTGGGCTTCTTC |
| 1647 | SELPLG | 0.43 | TTGGACATCTCTAGTGTAGCTGCCA |
| 1648 | SEC31L2 | 0.32 | TGGACCCCACTGGCTGAGAATCTGG |
| 1649 | CD3Z | 0.3 | AAGCCTATACGTTTCTGTGGAGTAA |
| 1650 | PRKCQ | 0.31 | GGCCCACTGGACAACACTGATTCCT |
| 1651 | SH2D1A | 0.47 | ACTTGTCCTCAGCTTGGGCTTCTTC |
| 1652 | GZMB | 0.48 | TGGACCCCACTGGCTGAGAATCTGG |
| 1653 | CD1A | 0.3 | AAGCCTATACGTTTCTGTGGAGTAA |
| 1654 | LAIR1 | 0.32 | TTGGACATCTCTAGTGTAGCTGCCA |
| 1655 | AF1Q | 0.41 | TTGGACATCTCTAGTGTAGCTGCCA |
| 1656 | TRB@ | 0.35 | TCCTCCATCACCTGAAACACTGGAC |
| 1657 | SEPT6 | 0.35 | TGGACCCCACTGGCTGAGAATCTGG |
| 1658 | DOCK2 | 0.39 | AAGCCTATACGTTTCTGTGGAGTAA |
| 1659 | RPS19 | 0.41 | TTGGACATCTCTAGTGTAGCTGCCA |
| 1660 | CD3D | 0.4 | TTGGACATCTCTAGTGTAGCTGCCA |
| 1661 | T3JAM | 0.32 | TGGACCCCACTGGCTGAGAATCTGG |
| 1662 | FNBP1 | 0.31 | GCCCCACTGGACAACACTGATTCCT |
| 1663 | CD6 | 0.33 | TGGACCCCACTGGCTGAGAATCTGG |
| 1664 | ZAP70 | 0.52 | CACCCAGCTGGTCCTGTGGATGGGA |
| 1665 | LST1 | 0.34 | AAATGTTTCCTTGTGCCTGCTCCTG |
| 1666 | BCAT1 | 0.35 | AAGCCTATACGTTTCTGTGGAGTAA |
| 1667 | PRF1 | 0.4 | AAGCCTATACGTTTCTGTGGAGTAA |
| 1668 | AIF1 | 0.3 | TTGGACATCTCTAGTGTAGCTGCCA |
| 1669 | RAG2 | 0.38 | TGGACCCCACTGGCTGAGAATCTGG |
| 1670 | CD1E | 0.35 | ACTTGTCCTCAGCTTGGGCTTCTTC |
| 1671 | CYFIP2 | 0.38 | TTGGACATCTCTAGTGTAGCTGCCA |
| 1672 | TARP | 0.3 | TGGACCCCACTGGCTGAGAATCTGG |
| 1673 | TRIM | 0.36 | CACCCAGCTGGTCCTGTGGATGGGA |
| 1674 | GLTSCR2 | 0.37 | TCCTCCATCACCTGAAACACTGGAC |
| 1675 | GIMAP5 | 0.3 | ACTTGTCCTCAGCTTGGGCTTCTTC |
| 1676 | ARHGAP15 | 0.32 | AAGCCTATACGTTTCTGTGGAGTAA |
| 1677 | NOTCH1 | 0.31 | CACCCAGCTGGTCCTGTGGATGGGA |
| 1678 | BCL11B | 0.3 | TCCTTGTGCCTGCTCCTGTACTTGT |
| 1679 | GIMAP6 | 0.34 | TTGGACATCTCTAGTGTAGCTGCCA |
| 1680 | STAG3 | 0.4 | TCCTGTACTTGTCCTCAGCTTGGGC |
| 1681 | TM6SF1 | 0.39 | TTGGACATCTCTAGTGTAGCTGCCA |
| 1682 | UBASH3A | 0.37 | TCCTGTACTTGTCCTCAGCTTGGGC |
| 1683 | MGC5566 | 0.36 | CACCCAGCTGGTCCTGTGGATGGGA |
| 1684 | FLJ22457 | 0.31 | TCCTCCATCACCTGAAACACTGGAC |
| 1685 | TPK1 | 0.33 | AAATGTTTCCTTGTGCCTGCTCCTG |

TABLE 67
Mechlorethamine biomarkers.

| | | | |
|---|---|---|---|
| SEQ | | | |
| ID | | Corre- | |
| NO | Gene | lation | Medianprobe |

| | | | |
|---|---|---|---|
| 1686 | PRG1 | 0.37 | GCCCCACTGGACAACACTGATTCCT |
| 1687 | SLC2A3 | 0.35 | ACTTGTCCTCAGCTTGGGCTTCTTC |
| 1688 | RPS19 | 0.32 | ACTTGTCCTCAGCTTGGGCTTCTTC |
| 1689 | PSMB10 | 0.34 | TGCCTGCTCCTGTACTTGTCCTCAG |
| 1690 | ITM2A | 0.33 | TGCCTGCTCCTGTACTTGTCCTCAG |
| 1691 | DGKA | 0.37 | TGCCTGCTCCTGTACTTGTCCTCAG |
| 1692 | SEMA4D | 0.34 | TCCTCCATCACCTGAAACACTGGAC |
| 1693 | SLA | 0.33 | TGCCTGCTCCTGTACTTGTCCTCAG |
| 1694 | IL2RG | 0.3 | TGGACCCCACTGGCTGAGAATCTGG |
| 1695 | MFNG | 0.42 | AAGCCTATACGTTTCTGTGGAGTAA |
| 1696 | ALOX5AP | 0.31 | AAGCCTATACGTTTCTGTGGAGTAA |
| 1697 | GPSM3 | 0.34 | AAGCCTATACGTTTCTGTGGAGTAA |
| 1698 | PSMB9 | 0.36 | ACTTGTCCTCAGCTTGGGCTTCTTC |
| 1699 | SELL | 0.34 | CACCCAGCTGGTCCTGTGGATGGGA |
| 1700 | ADA | 0.35 | AAATGTTTCCTTGTGCCTGCTCCTG |
| 1701 | FMNL1 | 0.4 | CACCCAGCTGGTCCTGTGGATGGGA |
| 1702 | MYB | 0.34 | TGGACCCCACTGGCTGAGAATCTGG |
| 1703 | PTPN7 | 0.43 | AAGCCTATACGTTTCTGTGGAGTAA |
| 1704 | CXorf9 | 0.32 | TGCCTGCTCCTGTACTTGTCCTCAG |
| 1705 | RHOH | 0.33 | TTGGACATCTCTAGTGTAGCTGCCA |
| 1706 | ZNFN1A1 | 0.31 | TCCTCCATCACCTGAAACACTGGAC |
| 1707 | CENTB1 | 0.43 | TCCTCCATCACCTGAAACACTGGAC |
| 1708 | FXYD2 | 0.35 | TTGGACATCTCTAGTGTAGCTGCCA |
| 1709 | CD1D | 0.4 | TTGGACATCTCTAGTGTAGCTGCCA |
| 1710 | STAT4 | 0.44 | TTGGACATCTCTAGTGTAGCTGCCA |
| 1711 | MAP4K1 | 0.34 | GCCCCACTGGACAACACTGATTCCT |
| 1712 | CCR7 | 0.39 | TGGACCCCACTGGCTGAGAATCTGG |
| 1713 | PDE4C | 0.33 | TCCTTGTGCCTGCTCCTGTACTTGT |
| 1714 | CD3G | 0.4 | GCCCCACTGGACAACACTGATTCCT |
| 1715 | CCR9 | 0.34 | TGGACCCCACTGGCTGAGAATCTGG |
| 1716 | SP110 | 0.31 | AAATGTTTCCTTGTGCCTGCTCCTG |
| 1717 | TK2 | 0.33 | TCCTGTACTTGTCCTCAGCTTGGGC |
| 1718 | TNFAIP8 | 0.34 | GCCCCACTGGACAACACTGATTCCT |
| 1719 | NAP1L1 | 0.35 | TCCTGTACTTGTCCTCAGCTTGGGC |
| 1720 | SELPLG | 0.35 | TCCTGTACTTGTCCTCAGCTTGGGC |
| 1721 | SEC31L2 | 0.38 | TGCCTGCTCCTGTACTTGTCCTCAG |
| 1722 | CD3Z | 0.44 | TTGGACATCTCTAGTGTAGCTGCCA |
| 1723 | PRKCQ | 0.37 | TCCTGTACTTGTCCTCAGCTTGGGC |
| 1724 | SH2D1A | 0.41 | GCCCCACTGGACAACACTGATTCCT |
| 1725 | GZMB | 0.43 | TGGACCCCACTGGCTGAGAATCTGG |
| 1726 | CD1A | 0.39 | TGGACCCCACTGGCTGAGAATCTGG |
| 1727 | LAIR1 | 0.35 | TGGACCCCACTGGCTGAGAATCTGG |
| 1728 | TRB@ | 0.33 | TTGGACATCTCTAGTGTAGCTGCCA |
| 1729 | SEPT6 | 0.3 | CACCCAGCTGGTCCTGTGGATGGGA |
| 1730 | DOCK2 | 0.34 | TGGACCCCACTGGCTGAGAATCTGG |
| 1731 | CG018 | 0.33 | TGGACCCCACTGGCTGAGAATCTGG |
| 1732 | WBSCR20C | 0.34 | TCCTGTACTTGTCCTCAGCTTGGGC |
| 1733 | CD3D | 0.33 | ACTTGTCCTCAGCTTGGGCTTCTTC |
| 1734 | CD6 | 0.32 | AAGCCTATACGTTTCTGTGGAGTAA |
| 1735 | LST1 | 0.33 | TTGGACATCTCTAGTGTAGCTGCCA |
| 1736 | GPR65 | 0.42 | AAGCCTATACGTTTCTGTGGAGTAA |
| 1737 | PRF1 | 0.34 | CACCCAGCTGGTCCTGTGGATGGGA |
| 1738 | ALMS1 | 0.41 | TCCTGTACTTGTCCTCAGCTTGGGC |
| 1739 | AIF1 | 0.31 | GCCCCACTGGACAACACTGATTCCT |
| 1740 | CD1E | 0.31 | CACCCAGCTGGTCCTGTGGATGGGA |
| 1741 | CYFIP2 | 0.33 | GCCCCACTGGACAACACTGATTCCT |
| 1742 | TARP | 0.31 | AAATGTTTCCTTGTGCCTGCTCCTG |
| 1743 | GLTSCR2 | 0.31 | AAGCCTATACGTTTCTGTGGAGTAA |
| 1744 | FLJ12270 | 0.34 | TGGACCCCACTGGCTGAGAATCTGG |
| 1745 | ARHGAP15 | 0.33 | GCCCCACTGGACAACACTGATTCCT |
| 1746 | NAP1L2 | 0.32 | GCCCCACTGGACAACACTGATTCCT |
| 1747 | CECR1 | 0.34 | TCCTTGTGCCTGCTCCTGTACTTGT |
| 1748 | GIMAP6 | 0.35 | TCCTGTACTTGTCCTCAGCTTGGGC |
| 1749 | STAG3 | 0.33 | CACCCAGCTGGTCCTGTGGATGGGA |
| 1750 | TM6SF1 | 0.3 | CACCCAGCTGGTCCTGTGGATGGGA |
| 1751 | C15orf25 | 0.36 | TTGGACATCTCTAGTGTAGCTGCCA |
| 1752 | MGC5566 | 0.32 | TCCTGTACTTGTCCTCAGCTTGGGC |
| 1753 | FLJ22457 | 0.34 | AAATGTTTCCTTGTGCCTGCTCCTG |
| 1754 | ET | 0.32 | CACCCAGCTGGTCCTGTGGATGGGA |
| 1755 | TPK1 | 0.34 | CACCCAGCTGGTCCTGTGGATGGGA |
| 1756 | PHF11 | 0.36 | TTGGACATCTCTAGTGTAGCTGCCA |

TABLE 68
Streptozocin biomarkers.

| | | | |
|---|---|---|---|
| SEQ | | | |
| ID | | Corre- | |
| NO | Gene | lation | Medianprobe |

| | | | |
|---|---|---|---|
| 1757 | PGK1 | 0.32 | TGCCTGCTCCTGTACTTGTCCTCAG |
| 1758 | SCD | 0.31 | TGGACCCCACTGGCTGAGAATCTGG |
| 1759 | INSIG1 | 0.3 | TGCCTGCTCCTGTACTTGTCCTCAG |
| 1760 | IGBP1 | 0.39 | TCCTCCATCACCTGAAACACTGGAC |
| 1761 | TNFAIP3 | 0.31 | TCCTCCATCACCTGAAACACTGGAC |
| 1762 | TNFSF10 | 0.31 | CACCCAGCTGGTCCTGTGGATGGGA |
| 1763 | ABCA1 | 0.34 | TGCCTGCTCCTGTACTTGTCCTCAG |
| 1764 | AGA | 0.31 | TGGACCCCACTGGCTGAGAATCTGG |
| 1765 | ABCA8 | 0.31 | CACCCAGCTGGTCCTGTGGATGGGA |
| 1766 | DBC1 | 0.31 | TGCCTGCTCCTGTACTTGTCCTCAG |
| 1767 | PTGER2 | 0.32 | ACTTGTCCTCAGCTTGGGCTTCTTC |
| 1768 | UGT1A3 | 0.32 | TCCTCCATCACCTGAAACACTGGAC |
| 1769 | C10orf10 | 0.3 | CACCCAGCTGGTCCTGTGGATGGGA |
| 1770 | TM4SF13 | 0.34 | TGGACCCCACTGGCTGAGAATCTGG |
| 1771 | CGI-90 | 0.31 | TCCTTGTGCCTGCTCCTGTACTTGT |
| 1772 | LXN | 0.31 | AAGCCTATACGTTTCTGTGGAGTAA |
| 1773 | DNAJC12 | 0.35 | TTGGACATCTCTAGTGTAGCTGCCA |
| 1774 | HIPK2 | 0.31 | CACCCAGCTGGTCCTGTGGATGGGA |
| 1775 | C9orf95 | 0.36 | ACTTGTCCTCAGCTTGGGCTTCTTC |

TABLE 69
Carmustine biomarkers.

| | | | |
|---|---|---|---|
| SEQ | | | |
| ID | | Corre- | |
| NO | Gene | lation | Medianprobe |

| | | | |
|---|---|---|---|
| 1776 | RPLP2 | 0.34 | TGCCTGCTCCTGTACTTGTCCTCAG |
| 1777 | CD99 | 0.31 | ACTTGTCCTCAGCTTGGGCTTCTTC |
| 1778 | IFITM1 | 0.36 | TCCTCCATCACCTGAAACACTGGAC |
| 1779 | INSIG1 | 0.31 | TCCTCCATCACCTGAAACACTGGAC |
| 1780 | ALDOC | 0.4 | TGCCTGCTCCTGTACTTGTCCTCAG |
| 1781 | ITM2A | 0.33 | TCCTTGTGCCTGCTCCTGTACTTGT |
| 1782 | SERPINA1 | 0.39 | TTGGACATCTCTAGTGTAGCTGCCA |
| 1783 | C1QR1 | 0.35 | AAGCCTATACGTTTCTGTGGAGTAA |
| 1784 | STAT5A | 0.39 | TTGGACATCTCTAGTGTAGCTGCCA |
| 1785 | INPP5D | 0.44 | TCCTTGTGCCTGCTCCTGTACTTGT |
| 1786 | SATB1 | 0.36 | AAATGTTTCCTTGTGCCTGCTCCTG |
| 1787 | VPS16 | 0.31 | AAATGTTTCCTTGTGCCTGCTCCTG |
| 1788 | SLA | 0.37 | TCCTGTACTTGTCCTCAGCTTGGGC |
| 1789 | IL2RG | 0.45 | TCCTCCATCACCTGAAACACTGGAC |
| 1790 | MFNG | 0.33 | TCCTCCATCACCTGAAACACTGGAC |
| 1791 | SELL | 0.38 | AAGCCTATACGTTTCTGTGGAGTAA |
| 1792 | LRMP | 0.41 | GCCCCACTGGACAACACTGATTCCT |
| 1793 | ICAM2 | 0.54 | TCCTCCATCACCTGAAACACTGGAC |
| 1794 | MYB | 0.31 | ACTTGTCCTCAGCTTGGGCTTCTTC |
| 1795 | PTPN7 | 0.3 | TGCCTGCTCCTGTACTTGTCCTCAG |
| 1796 | ARHGAP25 | 0.42 | TTGGACATCTCTAGTGTAGCTGCCA |
| 1797 | LCK | 0.41 | TGGACCCCACTGGCTGAGAATCTGG |
| 1798 | CXorf9 | 0.35 | TGGACCCCACTGGCTGAGAATCTGG |
| 1799 | RHOH | 0.41 | AAATGTTTCCTTGTGCCTGCTCCTG |
| 1800 | ZNFN1A1 | 0.37 | TGCCTGCTCCTGTACTTGTCCTCAG |
| 1801 | CENTB1 | 0.59 | ACTTGTCCTCAGCTTGGGCTTCTTC |
| 1802 | ADD2 | 0.34 | TCCTTGTGCCTGCTCCTGTACTTGT |
| 1803 | LCP2 | 0.33 | TTGGACATCTCTAGTGTAGCTGCCA |
| 1804 | SFI1 | 0.39 | TGCCTGCTCCTGTACTTGTCCTCAG |
| 1805 | DBT | 0.42 | ACTTGTCCTCAGCTTGGGCTTCTTC |
| 1806 | GZMA | 0.34 | CACCCAGCTGGTCCTGTGGATGGGA |
| 1807 | CD2 | 0.36 | TGGACCCCACTGGCTGAGAATCTGG |
| 1808 | BATF | 0.38 | ACTTGTCCTCAGCTTGGGCTTCTTC |
| 1809 | HIST1H4C | 0.31 | TCCTGTACTTGTCCTCAGCTTGGGC |
| 1810 | ARHGAP6 | 0.4 | TCCTCCATCACCTGAAACACTGGAC |
| 1811 | VAV1 | 0.42 | TGGACCCCACTGGCTGAGAATCTGG |
| 1812 | MAP4K1 | 0.31 | TCCTTGTGCCTGCTCCTGTACTTGT |
| 1813 | CCR7 | 0.31 | TCCTTGTGCCTGCTCCTGTACTTGT |
| 1814 | PDE4C | 0.57 | TCCTCCATCACCTGAAACACTGGAC |
| 1815 | CD3G | 0.44 | AAGCCTATACGTTTCTGTGGAGTAA |
| 1816 | CCR9 | 0.37 | AAATGTTTCCTTGTGCCTGCTCCTG |
| 1817 | SP140 | 0.48 | TCCTGTACTTGTCCTCAGCTTGGGC |
| 1818 | TK2 | 0.31 | TGGACCCCACTGGCTGAGAATCTGG |
| 1819 | LCP1 | 0.38 | TCCTCCATCACCTGAAACACTGGAC |
| 1820 | IFI16 | 0.34 | GCCCCACTGGACAACACTGATTCCT |
| 1821 | CXCR4 | 0.42 | GCCCCACTGGACAACACTGATTCCT |
| 1822 | ARHGEF6 | 0.45 | AAATGTTTCCTTGTGCCTGCTCCTG |
| 1823 | PSCDBP | 0.42 | TCCTGTACTTGTCCTCAGCTTGGGC |
| 1824 | SELPLG | 0.52 | TGGACCCCACTGGCTGAGAATCTGG |
| 1825 | SEC31L2 | 0.42 | TCCTGTACTTGTCCTCAGCTTGGGC |
| 1826 | CD3Z | 0.34 | TCCTCCATCACCTGAAACACTGGAC |
| 1827 | PRKCQ | 0.46 | TCCTTGTGCCTGCTCCTGTACTTGT |
| 1828 | SH2D1A | 0.46 | TGCCTGCTCCTGTACTTGTCCTCAG |
| 1829 | GZMB | 0.55 | TTGGACATCTCTAGTGTAGCTGCCA |
| 1830 | CD1A | 0.34 | TCCTTGTGCCTGCTCCTGTACTTGT |
| 1831 | GATA2 | 0.41 | TTGGACATCTCTAGTGTAGCTGCCA |
| 1832 | LY9 | 0.54 | TCCTCCATCACCTGAAACACTGGAC |
| 1833 | LAIR1 | 0.3 | TTGGACATGTCTAGTGTAGCTGCCA |
| 1834 | TRB@ | 0.33 | TCCTCCATCACCTGAAACACTGGAC |
| 1835 | SEPT6 | 0.32 | ACTTGTCCTCAGCTTGGGCTTCTTC |
| 1836 | HA-1 | 0.32 | TCCTCCATCACCTGAAACACTGGAC |
| 1837 | SLC43A3 | 0.32 | TCCTGTACTTGTCCTCAGCTTGGGC |
| 1838 | DOCK2 | 0.31 | TCCTCCATCACCTGAAACACTGGAC |
| 1839 | CG018 | 0.42 | ACTTGTCCTCAGCTTGGGCTTCTTC |
| 1840 | MLC1 | 0.33 | TGCCTGCTCCTGTACTTGTCCTCAG |
| 1841 | CD3D | 0.35 | TCCTGTACTTGTCCTCAGCTTGGGC |
| 1842 | T3JAM | 0.34 | CACCCAGCTGGTCCTGTGGATGGGA |
| 1843 | CD6 | 0.43 | TCCTGTACTTGTCCTCAGCTTGGGC |
| 1844 | ZAP70 | 0.43 | GCCCCACTGGACAACACTGATTCCT |
| 1845 | DOK2 | 0.3 | TCCTGTACTTGTCCTCAGCTTGGGC |
| 1846 | LST1 | 0.36 | TCCTGTACTTGTCCTCAGCTTGGGC |
| 1847 | GPR65 | 0.31 | TCCTGTACTTGTCCTCAGCTTGGGC |
| 1848 | PRF1 | 0.32 | TCCTTGTGCCTGCTCCTGTACTTGT |
| 1849 | ALMS1 | 0.38 | TTGGACATCTCTAGTGTAGCTGCCA |
| 1850 | AIF1 | 0.31 | TCCTTGTGCCTGCTCCTGTACTTGT |
| 1851 | PRDX2 | 0.48 | GCCCCACTGGACAACACTGATTCCT |
| 1852 | FLJ12151 | 0.36 | AAATGTTTCCTTGTGCCTGCTCCTG |
| 1853 | FBXW12 | 0.37 | TGCCTGCTCCTGTACTTGTCCTCAG |
| 1854 | CD1E | 0.34 | AAGCCTATACGTTTCTGTGGAGTAA |
| 1855 | CYFIP2 | 0.3 | TCCTTGTGCCTGCTCCTGTACTTGT |
| 1856 | TARP | 0.33 | TCCTGTACTTGTCCTCAGCTTGGGC |
| 1857 | TRIM | 0.38 | CACCCAGCTGGTCCTGTGGATGGGA |
| 1858 | RPL10L | 0.43 | AAATGTTTCCTTGTGCCTGCTCCTG |
| 1859 | GLTSCR2 | 0.43 | CACCCAGCTGGTCCTGTGGATGGGA |
| 1860 | CKIP-1 | 0.33 | TCCTTGTGCCTGCTCCTGTACTTGT |
| 1861 | NRN1 | 0.3 | TCCTTGTGCCTGCTCCTGTACTTGT |
| 1862 | ARHGAP15 | 0.4 | TCCTCCATCACCTGAAACACTGGAC |
| 1863 | NOTCH1 | 0.32 | TGCCTGCTCCTGTACTTGTCCTCAG |
| 1864 | PSCD4 | 0.4 | CACCCAGCTGGTCCTGTGGATGGGA |
| 1865 | C13orf18 | 0.31 | AAGCCTATACGTTTCTGTGGAGTAA |
| 1866 | BCL11B | 0.35 | ACTTGTCCTCAGCTTGGGCTTCTTC |
| 1867 | GIMAP6 | 0.33 | ACTTGTCCTCAGCTTGGGCTTCTTC |
| 1868 | STAG3 | 0.31 | TCCTGTACTTGTCCTCAGCTTGGGC |
| 1869 | NARF | 0.34 | TCCTGTACTTGTCCTCAGCTTGGGC |
| 1870 | TM6SF1 | 0.48 | TCCTCCATCACCTGAAACACTGGAC |
| 1871 | C15orf25 | 0.32 | TCCTGTACTTGTCCTCAGCTTGGGC |
| 1872 | FLJ11795 | 0.35 | GCCCCACTGGACAACACTGATTCCT |
| 1873 | SAMSN1 | 0.37 | GCCCCACTGGACAACACTGATTCCT |
| 1874 | UBASH3A | 0.4 | TCCTGTACTTGTCCTCAGCTTGGGC |
| 1875 | PACAP | 0.31 | TGCCTGCTCCTGTACTTGTCCTCAG |
| 1876 | LEF1 | 0.3 | CACCCAGCTGGTCCTGTGGATGGGA |
| 1877 | IL21R | 0.34 | AAGCCTATACGTTTCTGTGGAGTAA |
| 1878 | TCF4 | 0.41 | GCCCCACTGGACAACACTGATTCCT |
| 1879 | DKFZP434B0335 | 0.33 | TCCTGTACTTGTCCTCAGCTTGGGC |

TABLE 70
Lomustine biomarkers.

| | | | |
|---|---|---|---|
| SEQ | | | |
| ID | | Corre- | |
| NO | Gene | lation | Medianprobe |

| | | | |
|---|---|---|---|
| 1880 | RPS15 | 0.43 | TCCTGTACTTGTCCTCAGCTTGGGC |
| 1881 | INSIG1 | 0.31 | TGGACCCCACTGGCTGAGAATCTGG |
| 1882 | ALDOC | 0.39 | TGCCTGCTCCTGTACTTGTCCTCAG |
| 1883 | ITM2A | 0.32 | TCCTCCATCACCTGAAACACTGGAC |
| 1884 | C1QR1 | 0.33 | TGCCTGCTCCTGTACTTGTCCTCAG |
| 1885 | STAT5A | 0.37 | TGCCTGCTCCTGTACTTGTCCTCAG |
| 1886 | INPP5D | 0.32 | TCCTGTACTTGTCCTCAGCTTGGGC |
| 1887 | VPS16 | 0.32 | TGCCTGCTCCTGTACTTGTCCTCAG |
| 1888 | SLA | 0.32 | TGCCTGCTCCTGTACTTGTCCTCAG |
| 1889 | USP20 | 0.41 | ACTTGTCCTCAGCTTGGGCTTCTTC |
| 1890 | IL2RG | 0.31 | TCCTGTACTTGTCCTCAGCTTGGGC |
| 1891 | MFNG | 0.4 | ACTTGTCCTCAGCTTGGGCTTCTTC |
| 1892 | LRMP | 0.43 | GCCCCACTGGACAACACTGATTCCT |
| 1893 | EVI2A | 0.35 | ACTTGTCCTCAGCTTGGGCTTCTTC |
| 1894 | PTPN7 | 0.35 | TCCTTGTGCCTGCTCCTGTACTTGT |
| 1895 | ARHGAP25 | 0.39 | TCCTGTACTTGTCCTCAGCTTGGGC |
| 1896 | RHOH | 0.31 | AAGCCTATACGTTTCTGTGGAGTAA |
| 1897 | ZNFN1A1 | 0.31 | TCCTGTACTTGTCCTCAGCTTGGGC |
| 1898 | CENTB1 | 0.35 | TCCTGTACTTGTCCTCAGCTTGGGC |
| 1899 | LCP2 | 0.41 | TGGACCCCACTGGCTGAGAATCTGG |
| 1900 | SPI1 | 0.35 | TGCCTGCTCCTGTACTTGTCCTCAG |
| 1901 | ARHGAP6 | 0.33 | TTGGACATCTCTAGTGTAGCTGCCA |
| 1902 | MAP4K1 | 0.34 | CACCCAGCTGGTCCTGTGGATGGGA |
| 1903 | CCR7 | 0.35 | TCCTCCATCACCTGAAACACTGGAC |
| 1904 | LY96 | 0.35 | GCCCCACTGGACAACACTGATTCCT |
| 1905 | C6orf32 | 0.32 | ACTTGTCCTCAGCTTGGGCTTCTTC |
| 1906 | MAGEA1 | 0.31 | AAATGTTTCCTTGTGCCTGCTCCTG |
| 1907 | SP140 | 0.35 | TTGGACATCTCTAGTGTAGCTGCCA |
| 1908 | LCP1 | 0.36 | TCCTCCATCACCTGAAACACTGGAC |
| 1909 | IFI16 | 0.39 | TGCCTGCTCCTGTACTTGTCCTCAG |
| 1910 | ARHGEF6 | 0.33 | TCCTCCATCACCTGAAACACTGGAC |
| 1911 | PSCDBP | 0.43 | AAGCCTATACGTTTCTGTGGAGTAA |
| 1912 | SELPLG | 0.3 | ACTTGTCCTCAGCTTGGGCTTCTTC |
| 1913 | CD3Z | 0.35 | AAGCCTATACGTTTCTGTGGAGTAA |
| 1914 | PRKCQ | 0.4 | TCCTTGTGCCTGCTCCTGTACTTGT |
| 1915 | GZMB | 0.31 | AAGCCTATACGTTTCTGTGGAGTAA |
| 1916 | LAIR1 | 0.38 | TGGACCCCACTGGCTGAGAATCTGG |
| 1917 | SH2D1A | 0.36 | TCCTGTACTTGTCCTCAGCTTGGGC |
| 1918 | TRB@ | 0.39 | TTGGACATCTCTAGTGTAGCTGCCA |
| 1919 | RFP | 0.35 | TGCCTGCTCCTGTACTTGTCCTCAG |
| 1920 | SEPT6 | 0.41 | TCCTCCATCACCTGAAACACTGGAC |
| 1921 | HA-1 | 0.43 | TCCTGTACTTGTCCTCAGCTTGGGC |
| 1922 | SLC43A3 | 0.4 | ACTTGTCCTCAGCTTGGGCTTCTTC |
| 1923 | CD3D | 0.32 | TCCTTGTGCCTGCTCCTGTACTTGT |
| 1924 | T3JAM | 0.3 | TGGACCCCACTGGCTGAGAATCTGG |
| 1925 | GPR65 | 0.34 | GCCCCACTGGACAACACTGATTCCT |
| 1926 | PRF1 | 0.36 | TGCCTGCTCCTGTACTTGTCCTCAG |
| 1927 | AIF1 | 0.33 | TGGACCCCACTGGCTGAGAATCTGG |
| 1928 | LPXN | 0.38 | AAATGTTTCCTTGTGCCTGCTCCTG |
| 1929 | RPL10L | 0.3 | TGGACCCCACTGGCTGAGAATCTGG |
| 1930 | SITPEC | 0.36 | CACCCAGCTGGTCCTGTGGATGGGA |
| 1931 | ARHGAP15 | 0.33 | TGGACCCCACTGGCTGAGAATCTGG |
| 1932 | C13orf18 | 0.32 | TCCTGTACTTGTCCTCAGCTTGGGC |
| 1933 | NARF | 0.35 | TGGACCCCACTGGCTGAGAATCTGG |
| 1934 | TM6SF1 | 0.34 | TCCTTGTGCCTGCTCCTGTACTTGT |
| 1935 | PACAP | 0.31 | AAGCCTATACGTTTCTGTGGAGTAA |
| 1936 | TCF4 | 0.33 | TCCTTGTGCCTGCTCCTGTACTTGT |

TABLE 71
Mercaptopurine biomarkers.

| | | | |
|---|---|---|---|
| SEQ | | | |
| ID | | Corre- | |
| NO | Gene | lation | Medianprobe |

| | | | |
|---|---|---|---|
| 1937 | SSRP1 | 0.31 | GCCCCACTGGACAACACTGATTCCT |
| 1938 | ALDOC | 0.36 | AAATGTTTCCTTGTGCCTGCTCCTG |
| 1939 | C1QRl | 0.31 | TGCCTGCTCCTGTACTTGTCCTCAG |
| 1940 | TTF1 | 0.31 | TCCTGTACTTGTCCTCAGCTTGGGC |
| 1941 | PRIM1 | 0.31 | GCCCCACTGGACAACACTGATTCCT |
| 1942 | USP34 | 0.38 | TCCTCCATCACCTGAAACACTGGAC |
| 1943 | TK2 | 0.33 | TCCTGTACTTGTCCTCAGCTTGGGC |
| 1944 | GOLGIN-67 | 0.31 | TGCCTGCTCCTGTACTTGTCCTCAG |
| 1945 | N2D014 | 0.35 | ACTTGTCCTCAGCTTGGGCTTCTTC |
| 1946 | KIAA0220 | 0.31 | TCCTCCATCACCTGAAACACTGGAC |
| 1947 | SLC43A3 | 0.3 | TTGGACATCTCTAGTGTAGCTGCCA |
| 1948 | WBSCR20C | 0.3 | CACCCAGCTGGTCCTGTGGATGGGA |
| 1949 | ICAM2 | 0.3 | TGCCTGCTCCTGTACTTGTCCTCAG |
| 1950 | TEX10 | 0.32 | TGGACCCCACTGGCTGAGAATCTGG |
| 1951 | CHD7 | 0.3 | ACTTGTCCTCAGCTTGGGCTTCTTC |
| 1952 | SAMSN1 | 0.34 | TTGGACATCTCTAGTGTAGCTGCCA |
| 1953 | TPRT | 0.35 | ACTTGTCCTCAGCTTGGGCTTCTTC |

TABLE 72
Teniposide biomarkers.

| | | | |
|---|---|---|---|
| SEQ | | | |
| ID | | Corre- | |
| NO | Gene | lation | Medianprobe |

| | | | |
|---|---|---|---|
| 1954 | CD99 | 0.35 | TGCCTGCTCCTGTACTTGTCCTCAG |
| 1955 | INSIG1 | 0.35 | AAGCCTATACGTTTCTGTGGAGTAA |
| 1956 | PRG1 | 0.36 | TGCCTGCTCCTGTACTTGTCCTCAG |
| 1957 | ALDOC | 0.3 | ACTTGTCCTCAGCTTGGGCTTCTTC |
| 1958 | ITM2A | 0.33 | AAGCCTATACGTTTCTGTGGAGTAA |
| 1959 | SLA | 0.43 | GCCCCACTGGACAACACTGATTCCT |
| 1960 | SSBP2 | 0.31 | TCCTTGTGCCTGCTCCTGTACTTGT |
| 1961 | IL2RG | 0.37 | AAATGTTTCCTTGTGCCTGCTCCTG |
| 1962 | MFNG | 0.32 | TTGGACATCTCTAGTGTAGCTGCCA |
| 1963 | ALOX5AP | 0.32 | TCCTCCATCACCTGAAACACTGGAC |
| 1964 | C1orf29 | 0.3 | TCCTCCATCACCTGAAACACTGGAC |
| 1965 | SELL | 0.33 | CACCCAGCTGGTCCTGTGGATGGGA |
| 1966 | STC1 | 0.47 | TGGACCCCACTGGCTGAGAATCTGG |
| 1967 | LRMP | 0.33 | TCCTCCATCACCTGAAACACTGGAC |
| 1968 | MYB | 0.33 | TGCCTGCTCCTGTACTTGTCCTCAG |
| 1969 | PTPN7 | 0.34 | AAGCCTATACGTTTCTGTGGAGTAA |
| 1970 | CXorf9 | 0.42 | TTGGACATCTCTAGTGTAGCTGCCA |
| 1971 | RHOH | 0.31 | AAGCCTATACGTTTCTGTGGAGTAA |
| 1972 | ZNFN1A1 | 0.34 | CACCCAGCTGGTCCTGTGGATGGGA |
| 1973 | CENTB1 | 0.37 | TGGACCCCACTGGCTGAGAATCTGG |
| 1974 | ADD2 | 0.31 | TGCCTGCTCCTGTACTTGTCCTCAG |
| 1975 | CD1D | 0.37 | ACTTGTCCTCAGCTTGGGCTTCTTC |
| 1976 | BATF | 0.32 | TCCTGTACTTGTCCTCAGCTTGGGC |
| 1977 | MAP4K1 | 0.3 | GCCCCACTGGACAACACTGATTCCT |
| 1978 | CCR7 | 0.48 | TCCTGTACTTGTCCTCAGCTTGGGC |
| 1979 | PDE4C | 0.33 | TGGACCCCACTGGCTGAGAATCTGG |
| 1980 | CD3G | 0.33 | TTGGACATCTCTAGTGTAGCTGCCA |
| 1981 | CCR9 | 0.36 | ACTTGTCCTCAGCTTGGGCTTCTTC |
| 1982 | SP110 | 0.34 | AAATGTTTCCTTGTGCCTGCTCCTG |
| 1983 | TNFAIP8 | 0.31 | ACTTGTCCTCAGCTTGGGCTTCTTC |
| 1984 | NAP1L1 | 0.32 | AAGCCTATACGTTTCTGTGGAGTAA |
| 1985 | CXCR4 | 0.31 | ACTTGTCCTCAGCTTGGGCTTCTTC |
| 1986 | ARHGEF6 | 0.31 | TCCTGTACTTGTCCTCAGCTTGGGC |
| 1987 | GATA3 | 0.36 | TCCTGTACTTGTCCTCAGCTTGGGC |
| 1988 | SELPLG | 0.38 | AAGCCTATACGTTTCTGTGGAGTAA |
| 1989 | SEC31L2 | 0.46 | TGGACCCCACTGGCTGAGAATCTGG |
| 1990 | CD3Z | 0.35 | GCCCCACTGGACAACACTGATTCCT |
| 1991 | SH2D1A | 0.45 | AAATGTTTCCTTGTGCCTGCTCCTG |
| 1992 | GZMB | 0.35 | TCCTTGTGCCTGCTCCTGTACTTGT |
| 1993 | CD1A | 0.45 | GCCCCACTGGACAACACTGATTCCT |
| 1994 | SCN3A | 0.31 | TCCTTGTGCCTGCTCCTGTACTTGT |
| 1995 | LAIR1 | 0.31 | TCCTTGTGCCTGCTCCTGTACTTGT |
| 1996 | AF1Q | 0.3 | TCCTCCATCACCTGAAACACTGGAC |
| 1997 | TRB@ | 0.32 | AAGCCTATACGTTTCTGTGGAGTAA |
| 1998 | DOCK2 | 0.33 | TCCTGTACTTGTCCTCAGCTTGGGC |
| 1999 | MLC1 | 0.31 | TCCTCCATCACCTGAAACACTGGAC |
| 2000 | CD3D | 0.31 | TGGACCCCACTGGCTGAGAATCTGG |
| 2001 | T3JAM | 0.31 | ACTTGTCCTCAGCTTGGGCTTCTTC |
| 2002 | CD6 | 0.38 | TGCCTGCTCCTGTACTTGTCCTCAG |
| 2003 | ZAP70 | 0.34 | TCCTCCATCACCTGAAACACTGGAC |
| 2004 | IFI44 | 0.37 | TCCTTGTGCCTGCTCCTGTACTTGT |
| 2005 | GPR65 | 0.34 | TCCTGTACTTGTCCTCAGCTTGGGC |
| 2006 | PRF1 | 0.34 | TCCTCCATCACCTGAAACACTGGAC |
| 2007 | AIF1 | 0.33 | ACTTGTCCTCAGCTTGGGCTTCTTC |
| 2008 | WDR45 | 0.41 | GCCCCACTGGACAACACTGATTCCT |
| 2009 | CD1E | 0.31 | AAGCCTATACGTTTCTGTGGAGTAA |
| 2010 | CYFIP2 | 0.32 | TGGACCCCACTGGCTGAGAATCTGG |
| 2011 | TARP | 0.42 | CACCCAGCTGGTCCTGTGGATGGGA |
| 2012 | TRIM | 0.33 | TGGACCCCACTGGCTGAGAATCTGG |
| 2013 | ARHGAP15 | 0.38 | AAGCCTATACGTTTCTGTGGAGTAA |
| 2014 | NOTCH1 | 0.32 | TGCCTGCTCCTGTACTTGTCCTCAG |
| 2015 | STAG3 | 0.32 | GCCCCACTGGACAACACTGATTCCT |
| 2016 | NARF | 0.31 | AAGCCTATACGTTTCTGTGGAGTAA |
| 2017 | TM6SF1 | 0.33 | GCCCCACTGGACAACACTGATTCCT |
| 2018 | UBASH3A | 0.33 | TCCTGTACTTGTCCTCAGCTTGGGC |
| 2019 | MGC5566 | 0.31 | AGTTGTCCTCAGCTTGGGCTTCTTC |

TABLE 73
Dactinomycin biomarkers.

| | | | |
|---|---|---|---|
| SEQ | | | |
| ID | | Corre- | |
| NO | Gene | lation | Medianprobe |

| | | | |
|---|---|---|---|
| 2020 | ALDOC | 0.37 | GCCCCACTGGACAACACTGATTCCT |
| 2021 | C1QR1 | 0.36 | TGGACCCCACTGGCTGAGAATCTGG |
| 2022 | SLA | 0.31 | TCCTGTACTTGTCCTCAGCTTGGGC |
| 2023 | WBSCR20A | 0.31 | AAGCCTATACGTTTCTGTGGAGTAA |
| 2024 | MFNG | 0.3 | ACTTGTCCTCAGCTTGGGCTTCTTC |
| 2025 | SELL | 0.3 | GCCCCACTGGACAACACTGATTCCT |
| 2026 | MYB | 0.36 | TTGGACATCTCTAGTGTAGCTGCCA |
| 2027 | RHOH | 0.32 | TCCTTGTGCCTGCTCCTGTACTTGT |
| 2028 | ZNFN1A1 | 0.3 | AAATGTTTCCTTGTGCCTGCTCCTG |
| 2029 | LCP2 | 0.3 | CACCCAGCTGGTCCTGTGGATGGGA |
| 2030 | MAP4K1 | 0.34 | AAGCCTATACGTTTCTGTGGAGTAA |
| 2031 | CBFA2T3 | 0.35 | TCCTTGTGCCTGCTCCTGTACTTGT |
| 2032 | LCP1 | 0.32 | GCCCCACTGGACAACACTGATTCCT |
| 2033 | SELPLG | 0.33 | ACTTGTCCTCAGCTTGGGCTTCTTC |
| 2034 | CD3Z | 0.35 | GCCCCACTGGACAACACTGATTCCT |
| 2035 | LAIR1 | 0.33 | TGGACCCCACTGGCTGAGAATCTGG |
| 2036 | WBSCR20C | 0.3 | AAGCCTATACGTTTCTGTGGAGTAA |
| 2037 | CD3D | 0.35 | CACCCAGCTGGTCCTGTGGATGGGA |
| 2038 | GPR65 | 0.32 | AAATGTTTCCTTGTGCCTGCTCCTG |
| 2039 | ARHGAP15 | 0.32 | TCCTCCATCACCTGAAACACTGGAC |
| 2040 | FLJ10178 | 0.36 | TCCTTGTGCCTGCTCCTGTACTTGT |
| 2041 | NARF | 0.35 | TCCTCCATCACCTGAAACACTGGAC |
| 2042 | PUS3 | 0.32 | TCCTGTACTTGTCCTCAGCTTGGGC |

TABLE 74
Tretinoin biomarkers.

| | | | |
|---|---|---|---|
| SEQ | | | |
| ID | | Corre- | |
| NO | Gene | lation | Medianprobe |

| | | | |
|---|---|---|---|
| 2043 | PPIB | 0.31 | AAGCCTATACGTTTCTGTGGAGTAA |
| 2044 | ZFP36L2 | 0.48 | AAGCCTATACGTTTCTGTGGAGTAA |
| 2045 | IFI30 | 0.46 | ACTTGTCCTCAGCTTGGGCTTCTTC |
| 2046 | USP7 | 0.35 | TCCTCCATCACCTGAAACACTGGAC |
| 2047 | SRM | 0.43 | TCCTCCATCACCTGAAACACTGGAC |
| 2048 | SH3BP5 | 0.32 | TGCCTGCTCCTGTACTTGTCCTCAG |
| 2049 | ALDOC | 0.41 | TTGGACATCTCTAGTGTAGCTGCCA |
| 2050 | FADS2 | 0.33 | ACTTGTCCTCAGCTTGGGCTTCTTC |
| 2051 | GUSB | 0.38 | TTGGACATCTCTAGTGTAGCTGCCA |
| 2052 | PSCD1 | 0.48 | TCCTGTACTTGTCCTCAGCTTGGGC |
| 2053 | IQGAP2 | 0.34 | TCCTGTACTTGTCCTCAGCTTGGGC |
| 2054 | STS | 0.34 | GCCCCACTGGACAACACTGATTCCT |
| 2055 | MFNG | 0.36 | TGGACCCCACTGGCTGAGAATCTGG |
| 2056 | FLI1 | 0.33 | ACTTGTCCTCAGCTTGGGCTTCTTC |
| 2057 | PIM2 | 0.35 | TGGACCCCACTGGCTGAGAATCTGG |
| 2058 | INPP4A | 0.54 | TCCTGTACTTGTCCTCAGCTTGGGC |
| 2059 | LRMP | 0.51 | GCCCCACTGGACAACACTGATTCCT |
| 2060 | ICAM2 | 0.3 | AAATGTTTCCTTGTGCCTGCTCCTG |
| 2061 | EVI2A | 0.33 | CACCCAGCTGGTCCTGTGGATGGGA |
| 2062 | MAL | 0.46 | AAATGTTTCCTTGTGCCTGCTCCTG |
| 2063 | BTN3A3 | 0.43 | TTGGACATCTCTAGTGTAGCTGCCA |
| 2064 | PTPN7 | 0.4 | TTGGACATCTCTAGTGTAGCTGCCA |
| 2065 | IL10RA | 0.42 | TTGGACATCTCTAGTGTAGCTGCCA |
| 2066 | SPI1 | 0.41 | AAGCCTATACGTTTCTGTGGAGTAA |
| 2067 | TRAF1 | 0.3 | TGCCTGCTCCTGTACTTGTCCTCAG |
| 2068 | ITGB7 | 0.33 | TCCTTGTGCCTGCTCCTGTACTTGT |
| 2069 | ARHGAP6 | 0.32 | TGGACCCCACTGGCTGAGAATCTGG |
| 2070 | MAP4K1 | 0.52 | GCCCCACTGGACAACACTGATTCCT |
| 2071 | CD28 | 0.34 | AAGCCTATACGTTTCTGTGGAGTAA |
| 2072 | PTP4A3 | 0.3 | TCCTCCATCACCTGAAACACTGGAC |
| 2073 | LTB | 0.32 | ACTTGTCCTCAGCTTGGGCTTCTTC |
| 2074 | C1orf38 | 0.4 | TGCCTGCTCCTGTACTTGTCCTCAG |
| 2075 | WBSCR22 | 0.53 | TCCTCCATCACCTGAAACACTGGAC |
| 2076 | CD8B1 | 0.35 | TCCTCCATCACCTGAAACACTGGAC |
| 2077 | LCP1 | 0.35 | ACTTGTCCTCAGCTTGGGCTTCTTC |
| 2078 | FLJ13052 | 0.31 | TCCTCCATCACCTGAAACACTGGAC |
| 2079 | MEF2C | 0.71 | TTGGACATCTCTAGTGTAGCTGCCA |
| 2080 | PSCDBP | 0.41 | AAATGTTTCCTTGTGCCTGCTCCTG |
| 2081 | IL16 | 0.51 | TGGACCCCACTGGCTGAGAATCTGG |
| 2082 | SELPLG | 0.53 | TGCCTGCTCCTGTACTTGTCCTCAG |
| 2083 | MAGEA9 | 0.6 | AAATGTTTCCTTGTGCCTGCTCCTG |
| 2084 | LAIR1 | 0.43 | TCCTCCATCACCTGAAACACTGGAC |
| 2085 | TNFRSF25 | 0.53 | TCCTCCATCACCTGAAACACTGGAC |
| 2086 | EVI2B | 0.42 | ACTTGTCCTCAGCTTGGGCTTCTTC |
| 2087 | IGJ | 0.37 | TCCTTGTGCCTGCTCCTGTACTTGT |
| 2088 | PDCD4 | 0.47 | AAATGTTTCCTTGTGCCTGCTCCTG |
| 2089 | RASA4 | 0.52 | CACCCAGCTGGTCCTGTGGATGGGA |
| 2090 | HA-1 | 0.73 | AAGCCTATACGTTTCTGTGGAGTAA |
| 2091 | PLCL2 | 0.47 | TCCTGTACTTGTCCTCAGCTTGGGC |
| 2092 | RNASE6 | 0.31 | AAGCCTATACGTTTCTGTGGAGTAA |
| 2093 | WBSCR20C | 0.35 | TTGGACATCTCTAGTGTAGCTGCCA |
| 2094 | NUP210 | 0.36 | AAGCCTATACGTTTCTGTGGAGTAA |
| 2095 | RPL10L | 0.39 | ACTTGTCCTCAGCTTGGGCTTCTTC |
| 2096 | C11orf2 | 0.33 | TGGACCCCACTGGCTGAGAATCTGG |
| 2097 | CABC1 | 0.32 | TGCCTGCTCCTGTACTTGTCCTCAG |
| 2098 | ARHGEF3 | 0.37 | TCCTGTACTTGTCCTCAGCTTGGGC |
| 2099 | TAPBPL | 0.42 | TGCCTGCTCCTGTACTTGTCCTCAG |
| 2100 | CHST12 | 0.35 | AAATGTTTCCTTGTGCCTGCTCCTG |
| 2101 | FKBP11 | 0.54 | TGCCTGCTCCTGTACTTGTCCTCAG |
| 2102 | FLJ35036 | 0.42 | TTGGACATCTCTAGTGTAGCTGCCA |
| 2103 | MYLIP | 0.38 | CACCCAGCTGGTCCTGTGGATGGGA |
| 2104 | TXNDC5 | 0.31 | ACTTGTCCTCAGCTTGGGCTTCTTC |
| 2105 | PACAP | 0.3 | TCCTCCATCACCTGAAACACTGGAC |
| 2106 | TOSO | 0.34 | TCCTGTACTTGTCCTCAGCTTGGGC |
| 2107 | PNAS-4 | 0.37 | TGGACCCCACTGGCTGAGAATCTGG |
| 2108 | IL21R | 0.57 | AAGCCTATACGTTTCTGTGGAGTAA |
| 2109 | TCF4 | 0.64 | TCCTTGTGCCTGCTCCTGTACTTGT |

TABLE 75
Ifosfamide biomarkers.

| | | | |
|---|---|---|---|
| SEQ | | | |
| ID | | Corre- | |
| NO | Gene | lation | Medianprobe |

| | | | |
|---|---|---|---|
| 2110 | ARHGDIB | 0.36 | TGGACCCCACTGGCTGAGAATCTGG |
| 2111 | ZFP36L2 | 0.45 | TGGACCCCACTGGCTGAGAATCTGG |
| 2112 | ITM2A | 0.39 | AAGCCTATACGTTTCTGTGGAGTAA |
| 2113 | LGALS9 | 0.54 | AAATGTTTCCTTGTGCCTGCTCCTG |
| 2114 | INPP5D | 0.53 | TCCTGTACTTGTCCTCAGCTTGGGC |
| 2115 | SATB1 | 0.35 | TTGGACATCTCTAGTGTAGCTGCCA |
| 2116 | TFDP2 | 0.32 | AAGCCTATACGTTTCTGTGGAGTAA |
| 2117 | IL2RG | 0.32 | TGCCTGCTCCTGTACTTGTCCTCAG |
| 2118 | CD48 | 0.5 | ACTTGTCCTCAGCTTGGGCTTCTTC |
| 2119 | SELL | 0.32 | ACTTGTCCTCAGCTTGGGCTTCTTC |
| 2120 | ADA | 0.32 | TGCCTGCTCCTGTACTTGTCCTCAG |
| 2121 | LRMP | 0.34 | GCCCCACTGGACAACACTGATTCCT |
| 2122 | RIMS3 | 0.37 | AAGCCTATACGTTTCTGTGGAGTAA |
| 2123 | LCK | 0.37 | TCCTGTACTTGTCCTCAGCTTGGGC |
| 2124 | CXorf9 | 0.4 | CACCCAGCTGGTCCTGTGGATGGGA |
| 2125 | RHOH | 0.3 | GCCCCACTGGACAACACTGATTCCT |
| 2126 | ZNFN1A1 | 0.31 | TTGGACATCTCTAGTGTAGCTGCCA |
| 2127 | LCP2 | 0.37 | TCCTGTACTTGTCCTCAGCTTGGGC |
| 2128 | CD1D | 0.49 | TCCTCCATCACCTGAAACACTGGAC |
| 2129 | CD2 | 0.42 | CACCCAGCTGGTCCTGTGGATGGGA |
| 2130 | ZNF91 | 0.45 | AAATGTTTCCTTGTGCCTGCTCCTG |
| 2131 | MAP4K1 | 0.32 | TCCTTGTGCCTGCTCCTGTACTTGT |
| 2132 | CCR7 | 0.44 | TTGGACATCTCTAGTGTAGCTGCCA |
| 2133 | IGLL1 | 0.43 | TGCCTGCTCCTGTACTTGTCCTCAG |
| 2134 | CD3G | 0.3 | TCCTCCATCACCTGAAACACTGGAC |
| 2135 | ZNF430 | 0.31 | ACTTGTCCTCAGCTTGGGCTTCTTC |
| 2136 | CCR9 | 0.31 | TTGGACATCTCTAGTGTAGCTGCCA |
| 2137 | CXCR4 | 0.37 | ACTTGTCCTCAGCTTGGGCTTCTTC |
| 2138 | KIAA0922 | 0.31 | AAGCCTATACGTTTCTGTGGAGTAA |
| 2139 | TARP | 0.31 | GCCCCACTGGACAACACTGATTCCT |
| 2140 | FYN | 0.35 | TCCTGTACTTGTCCTCAGCTTGGGC |
| 2141 | SH2D1A | 0.34 | TTGGACATCTCTAGTGTAGCTGCCA |
| 2142 | CD1A | 0.31 | AAGCCTATACGTTTCTGTGGAGTAA |
| 2143 | LST1 | 0.33 | TTGGACATCTCTAGTGTAGCTGCCA |
| 2144 | LAIR1 | 0.36 | ACTTGTCCTCAGCTTGGGCTTCTTC |
| 2145 | TRB@ | 0.34 | TGGACCCCACTGGCTGAGAATCTGG |
| 2146 | SEPT6 | 0.39 | TTGGACATCTCTAGTGTAGCTGCCA |
| 2147 | CD3D | 0.37 | TCCTCCATCACCTGAAACACTGGAC |
| 2148 | CD6 | 0.32 | AAATGTTTCCTTGTGCCTGCTCCTG |
| 2149 | AIF1 | 0.34 | TGCCTGCTCCTGTACTTGTCCTCAG |
| 2150 | CD1E | 0.31 | TCCTGTACTTGTCCTCAGCTTGGGC |
| 2151 | TRIM | 0.32 | TCCTGTACTTGTCCTCAGCTTGGGC |
| 2152 | GLTSCR2 | 0.34 | TCCTGTACTTGTCCTCAGCTTGGGC |
| 2153 | ARHGAP15 | 0.33 | TCCTGTACTTGTCCTCAGCTTGGGC |
| 2154 | BIN2 | 0.33 | TGCCTGCTCCTGTACTTGTCCTCAG |
| 2155 | SH3TC1 | 0.32 | TGGACCCCACTGGCTGAGAATCTGG |
| 2156 | CECR1 | 0.36 | TCCTCCATCACCTGAAACACTGGAC |
| 2157 | BCL11B | 0.38 | TCCTCCATCACCTGAAACACTGGAC |
| 2158 | GIMAP6 | 0.32 | GCCCCACTGGACAACACTGATTCCT |
| 2159 | STAG3 | 0.46 | TTGGACATCTCTAGTGTAGCTGCCA |
| 2160 | GALNT6 | 0.32 | ACTTGTCCTCAGCTTGGGCTTCTTC |
| 2161 | MGC5566 | 0.49 | TCCTTGTGCCTGCTCCTGTACTTGT |
| 2162 | PACAP | 0.48 | TCCTGTACTTGTCCTCAGCTTGGGC |
| 2163 | LEF1 | 0.4 | TGCCTGCTCCTGTACTTGTCCTCAG |

TABLE 76
Tamoxifen biomarkers.

| | | | |
|---|---|---|---|
| SEQ | | | |
| ID | | Corre- | |
| NO | Gene | lation | Medianprobe |

| | | | |
|---|---|---|---|
| 2164 | MLP | 0.33 | TCCTGTACTTGTCCTCAGCTTGGGC |
| 2165 | GLUL | 0.33 | TCCTTGTGCCTGCTCCTGTACTTGT |
| 2166 | SLC9A3R1 | 0.37 | CACCCAGCTGGTCCTGTGGATGGGA |
| 2167 | ZFP36L2 | 0.33 | TTGGACATCTCTAGTGTAGCTGCCA |
| 2168 | INSIG1 | 0.31 | TCCTCCATCACCTGAAACACTGGAC |
| 2169 | TBL1X | 0.36 | TCCTGTACTTGTCCTCAGCTTGGGC |
| 2170 | NDUFAB1 | 0.43 | AAATGTTTCCTTGTGCCTGCTCCTG |
| 2171 | EBP | 0.31 | TGGACCCCACTGGCTGAGAATCTGG |
| 2172 | TRIM14 | 0.43 | TTGGACATCTCTAGTGTAGCTGCCA |
| 2173 | SRPK2 | 0.41 | GCCCCACTGGACAACACTGATTCCT |
| 2174 | PMM2 | 0.4 | AAATGTTTCCTTGTGCCTGCTCCTG |
| 2175 | CLDN3 | 0.41 | AAGCCTATACGTTTCTGTGGAGTAA |
| 2176 | GCH1 | 0.34 | TTGGACATCTCTAGTGTAGCTGCCA |
| 2177 | IDI1 | 0.34 | AAATGTTTCCTTGTGCCTGCTCCTG |
| 2178 | TTF1 | 0.46 | TCCTTGTGCCTGCTCCTGTACTTGT |
| 2179 | MYB | 0.39 | CACCCAGCTGGTCCTGTGGATGGGA |
| 2180 | RASGRP1 | 0.32 | CACCCAGCTGGTCCTGTGGATGGGA |
| 2181 | HIST1H3H | 0.38 | TGGACCCCACTGGCTGAGAATCTGG |
| 2182 | CBFA2T3 | 0.34 | AAATGTTTCCTTGTGCCTGCTCCTG |
| 2183 | SRRM2 | 0.43 | GCCCCACTGGACAACACTGATTCCT |
| 2184 | ANAPC5 | 0.31 | TCCTGTACTTGTCCTCAGCTTGGGC |
| 2185 | MBD4 | 0.5 | TCCTGTACTTGTCCTCAGCTTGGGC |
| 2186 | GATA3 | 0.32 | TCCTCCATCACCTGAAACACTGGAC |
| 2187 | HIST1H2BG | 0.32 | AAGCCTATACGTTTCTGTGGAGTAA |
| 2188 | RAB14 | 0.31 | TGGACCCCACTGGCTGAGAATCTGG |
| 2189 | PIK3R1 | 0.36 | AAGCCTATACGTTTCTGTGGAGTAA |
| 2190 | MGC50853 | 0.37 | CACCCAGCTGGTCCTGTGGATGGGA |
| 2191 | ELF1 | 0.35 | GCCCCACTGGACAACACTGATTCCT |
| 2192 | ZRF1 | 0.32 | TCCTTGTGCCTGCTCCTGTACTTGT |
| 2193 | ZNF394 | 0.31 | AAATGTTTCCTTGTGCCTGCTCCTG |
| 2194 | S100A14 | 0.39 | AAATGTTTCCTTGTGCCTGCTCCTG |
| 2195 | SLC6A14 | 0.31 | CACCCAGCTGGTCCTGTGGATGGGA |
| 2196 | GALNT6 | 0.37 | TCCTCCATCACCTGAAACACTGGAC |
| 2197 | SPDEF | 0.44 | AAATGTTTCCTTGTGCCTGCTCCTG |
| 2198 | TPRT | 0.5 | AAGCCTATACGTTTCTGTGGAGTAA |
| 2199 | CALML4 | 0.31 | TTGGACATCTCTAGTGTAGCTGCCA |

TABLE 77
Floxuridine biomarkers.

| | | | |
|---|---|---|---|
| SEQ | | | |
| ID | | Corre- | |
| NO | Gene | lation | Medianprobe |

| | | | |
|---|---|---|---|
| 2200 | CSDA | 0.33 | ACTTGTCCTCAGCTTGGGCTTCTTC |
| 2201 | F8A1 | 0.31 | TGGACCCCACTGGCTGAGAATCTGG |
| 2202 | KYNU | 0.32 | TGGACCCCACTGGCTGAGAATCTGG |
| 2203 | PHF14 | 0.31 | AAGCCTATACGTTTCTGTGGAGTAA |
| 2204 | SERPINB2 | 0.34 | TCCTCCATCACCTGAAACACTGGAC |
| 2205 | OPHN1 | 0.31 | GCCCCACTGGACAACACTGATTCCT |
| 2206 | HRMT1L2 | 0.31 | AAGCCTATACGTTTCTGTGGAGTAA |
| 2207 | TNFRSF1A | 0.3 | GCCCCACTGGACAACACTGATTCCT |
| 2208 | PPP4C | 0.31 | AAGCCTATACGTTTCTGTGGAGTAA |
| 2209 | CES1 | 0.3 | TCCTCCATCACCTGAAACACTGGAC |
| 2210 | TP53AP1 | 0.3 | GCCCCACTGGACAACACTGATTCCT |
| 2211 | TM4SF4 | 0.32 | GCCCCACTGGACAACACTGATTCCT |
| 2212 | RPL5 | 0.32 | TGCCTGCTCCTGTACTTGTCCTCAG |
| 2213 | BC008967 | 0.32 | TGGACCCCACTGGCTGAGAATCTGG |
| 2214 | TLK2 | 0.35 | TTGGACATCTCTAGTGTAGCTGCCA |
| 2215 | COL4A6 | 0.31 | TCCTTGTGCCTGCTCCTGTACTTGT |
| 2216 | PAK3 | 0.32 | CACCCAGCTGGTCCTGTGGATGGGA |
| 2217 | RECK | 0.34 | TCCTTGTGCCTGCTCCTGTACTTGT |
| 2218 | LOC51321 | 0.32 | AAGCCTATACGTTTCTGTGGAGTAA |
| 2219 | MST4 | 0.36 | TCCTCCATCACCTGAAACACTGGAC |
| 2220 | DERP6 | 0.32 | TGGACCCCACTGGCTGAGAATCTGG |
| 2221 | SCD4 | 0.33 | TCCTTGTGCCTGCTCCTGTACTTGT |
| 2222 | FLJ22800 | 0.31 | TGGACCCCACTGGCTGAGAATCTGG |

TABLE 78
Irinotecan biomarkers.

| | | | |
|---|---|---|---|
| SEQ | | | |
| ID | | Corre- | |
| NO | Gene | lation | Medianprobe |

| | | | |
|---|---|---|---|
| 2223 | CSDA | 0.32 | TGCCTGCTCCTGTACTTGTCCTCAG |
| 2224 | UBE2L6 | 0.32 | GCCCCACTGGACAACACTGATTCCT |
| 2225 | TAP1 | 0.44 | TGGACCCCACTGGCTGAGAATCTGG |
| 2226 | RPS19 | 0.32 | TGCCTGCTCCTGTACTTGTCCTCAG |
| 2227 | SERPINA1 | 0.32 | ACTTGTCCTCAGCTTGGGCTTCTTC |
| 2228 | C1QR1 | 0.31 | TTGGACATCTCTAGTGTAGCTGCCA |
| 2229 | SLA | 0.33 | CACCCAGCTGGTCCTGTGGATGGGA |
| 2230 | GPSM3 | 0.46 | TGCCTGCTCCTGTACTTGTCCTCAG |
| 2231 | PSMB9 | 0.3 | TGCCTGCTCCTGTACTTGTCCTCAG |
| 2232 | EDG1 | 0.34 | TGCCTGCTCCTGTACTTGTCCTCAG |
| 2233 | FMNL1 | 0.4 | GCCCCACTGGACAACACTGATTCCT |
| 2234 | PTPN7 | 0.39 | TTGGACATCTCTAGTGTAGCTGCCA |
| 2235 | ZNFN1A1 | 0.32 | AAGCCTATACGTTTCTGTGGAGTAA |
| 2236 | CENTB1 | 0.33 | TTGGACATCTCTAGTGTAGCTGCCA |
| 2237 | BATF | 0.41 | ACTTGTCCTCAGCTTGGGCTTCTTC |
| 2238 | MAP4K1 | 0.39 | AAATGTTTCCTTGTGCCTGCTCCTG |
| 2239 | PDE4C | 0.31 | AAGCCTATACGTTTCTGTGGAGTAA |
| 2240 | SP110 | 0.35 | TCCTTGTGCCTGCTCCTGTACTTGT |
| 2241 | HLA-DRA | 0.31 | TGGACCCCACTGGCTGAGAATCTGG |
| 2242 | IFI16 | 0.36 | TTGGACATCTCTAGTGTAGCTGCCA |
| 2243 | HLA-DRB1 | 0.32 | AAGCCTATACGTTTCTGTGGAGTAA |
| 2244 | ARHGEF6 | 0.43 | ACTTGTCCTCAGCTTGGGCTTCTTC |
| 2245 | SELPLG | 0.35 | TCCTTGTGCCTGCTCCTGTACTTGT |
| 2246 | SEC31L2 | 0.35 | CACCCAGCTGGTCCTGTGGATGGGA |
| 2247 | CD3Z | 0.51 | TCCTCCATCACCTGAAACACTGGAC |
| 2248 | PRKCQ | 0.39 | TTGGACATCTCTAGTGTAGCTGCCA |
| 2249 | SH2D1A | 0.43 | AAGCCTATACGTTTCTGTGGAGTAA |
| 2250 | GZMB | 0.49 | TCCTCCATCACCTGAAACACTGGAC |
| 2251 | TRB@ | 0.43 | ACTTGTCCTCAGCTTGGGCTTCTTC |
| 2252 | HLA-DPA1 | 0.47 | ACTTGTCCTCAGCTTGGGCTTCTTC |
| 2253 | AIM1 | 0.36 | TCCTTGTGCCTGCTCCTGTACTTGT |
| 2254 | DOCK2 | 0.39 | TGGACCCCACTGGCTGAGAATCTGG |
| 2255 | CD3D | 0.31 | TCCTGTACTTGTCCTCAGCTTGGGC |
| 2256 | IFITM1 | 0.31 | TTGGACATCTCTAGTGTAGCTGCCA |
| 2257 | ZAP70 | 0.31 | GCCCCACTGGACAACACTGATTCCT |
| 2258 | PRF1 | 0.47 | CACCCAGCTGGTCCTGTGGATGGGA |
| 2259 | Clorf24 | 0.39 | GCCCCACTGGACAACACTGATTCCT |
| 2260 | ARHGAP15 | 0.48 | TCCTCCATCACCTGAAACACTGGAC |
| 2261 | C13orf18 | 0.33 | CACCCAGCTGGTCCTGTGGATGGGA |
| 2262 | TM6SF1 | 0.37 | TCCTTGTGCCTGCTCCTGTACTTGT |

TABLE 79
Satraplatin biomarkers.

| | | | |
|---|---|---|---|
| SEQ | | | |
| ID | | Corre- | |
| NO | Gene | lation | Medianprobe |

| | | | |
|---|---|---|---|
| 2263 | STAT1 | 0.32 | TCCTGTACTTGTCCTCAGCTTGGGC |
| 2264 | HSBP1 | 0.33 | AAATGTTTCCTTGTGCCTGCTCCTG |
| 2265 | IFI30 | 0.35 | AAGCCTATACGTTTCTGTGGAGTAA |
| 2266 | RIOK3 | 0.36 | TCCTCCATCACCTGAAACACTGGAC |
| 2267 | TNFSF10 | 0.31 | ACTTGTCCTCAGCTTGGGCTTCTTC |
| 2268 | ALOX5AP | 0.3 | TCCTTGTGCCTGCTCCTGTACTTGT |
| 2269 | ADFP | 0.33 | TGGACCCCACTGGCTGAGAATCTGG |
| 2270 | IRS2 | 0.37 | TCCTGTACTTGTCCTCAGCTTGGGC |
| 2271 | EFEMP2 | 0.31 | TTGGACATCTCTAGTGTAGCTGCCA |
| 2272 | RTPK2 | 0.35 | TGGACCCCACTGGCTGAGAATCTGG |
| 2273 | DKFZp564I1922 | 0.33 | TCCTCCATCACCTGAAACACTGGAC |
| 2274 | MT1K | 0.34 | TCCTCCATCACCTGAAACACTGGAC |
| 2275 | RNASET2 | 0.38 | ACTTGTCCTCAGCTTGGGCTTCTTC |
| 2276 | EFHD2 | 0.31 | CACCCAGCTGGTCCTGTGGATGGGA |
| 2277 | TRIB3 | 0.33 | GCCCCACTGGACAACACTGATTCCT |
| 2278 | ACSL5 | 0.42 | AAATGTTTCCTTGTGCCTGCTCCTG |
| 2279 | IFIH1 | 0.37 | ACTTGTCCTCAGCTTGGGCTTCTTC |
| 2280 | DNAPTP6 | 0.42 | TGCCTGCTCCTGTACTTGTCCTCAG |

TABLE 80
Vincristine microRNA biomarkers.

| | | | |
|---|---|---|---|
| SEQ | | | |
| ID | | | |
| NO | Medianprobe | Corr | Sequence |

| | | | |
|---|---|---|---|
| 2281 | Hcd892 left | 0.3 | GAGGGCTGGAGAGGTTGGGTGCGCTTGTGCGTTTCACTTT |
| 2282 | Hcd678 right | 0.27 | GCCCTGAAGCTCCGGACTACAGCTCCCAGGCCTCTCCAAG |
| 2283 | mir-007-1-prec | 0.28 | TGTTGGCCTAGTTCTGTGTGGAAGACTAGTGATTTTGTTG |
| 2284 | MPR243 left | 0.25 | GTATTTACCTAGTTGTAATGTGGGTTGCCATGGTGTTTTG |
| 2285 | Hcd654 left | 0.25 | AACGAGTAAAAGGCGTACATGGGAGCGCGGGGCGGCAGAG |
| 2286 | mir-487No1 | 0.26 | TTATGACGAATCATACAGGGACATCCAGTTTTTCAGTATC |
| 2287 | Hcd794 right | 0.35 | GGCCACCACAGACACCAACAAGTTCAGTCCGTTTCTGCAG |
| 2288 | Hcd739 right | 0.32 | TATTAGCTGAGGGAGGGCTGGAGGCGGCTGCATTCCGACT |
| 2289 | Hcd562 right | 0.28 | CGCATGTCCTGGCCCTCGTCCTTCCATGGCACTGGCACCG |

TABLE 81
Cisplatin microRNA biomarkers.

| | | | |
|---|---|---|---|
| SEQ | | | |
| ID | | | |
| NO | Medianprobe | Corr | Sequence |

| | | | |
|---|---|---|---|
| 2290 | HUMTRF | 0.34 | GATCTAAAGGTCCCTGGTTCGATCCCGGGTTTCGGCACCA |
| 2291 | HPR187 right | 0.25 | TATTTATTACAAGGTCCTTCTTCCCCGTAAAACTTTGTCC |
| 2292 | mir-450-1 | 0.26 | AACGATACTAAACTGTTTTTGCGATGTGTTCCTAATATGC |
| 2293 | mir-155-prec | 0.31 | TTAATGCTAATCGTGATAGGGGTTTTTGCCTCCAACTGAC |
| 2294 | mir-515-15p | 0.25 | GATCTCATGCAGTCATTCTCCAAAAGAAAGCACTTTCTGT |
| 2295 | mir-181b-precNo2 | 0.25 | ACCATCGACCGTTGATTGTACCCTATGGCTAACCATCATC |
| 2296 | mir-124a-1-prec1 | 0.26 | ATACAATTAAGGCACGCGGTGAATGCCAAGAATGGGGCTG |
| 2297 | mir-450-2No1 | 0.3 | GAAAGATGCTAAACTATTTTTGCGATGTGTTCCTAATATG |
| 2298 | Hcd923 right | 0.31 | CTGGAGATAATGATTCTGCATTTCTAATTAACTCCCAGGT |
| 2299 | mir-342No1 | 0.31 | GTCTCACACAGAAATCGCACCCGTCACCTTGGCCTACTTA |
| 2300 | mir-142-prec | 0.27 | CCCATAAAGTAGAAAGCACTACTAACAGCACTGGAGGGTG |
| 2301 | mir-223-prec | 0.26 | GAGTGTCAGTTTGTCAAATACCCCAAGTGCGGCACATGCT |
| 2302 | Hcd754 left | 0.38 | TCCTCCTCCTCCTTTTCGTTCCGGCTCCCTGGCTGGCTCC |
| 2303 | Hcd213_HPR182 left | 0.3 | CTGTTTCATACTTGAGGAGAAATTATCCTTGGTGTGTTCG |

TABLE 82
Azaguanine microRNA biomarkers.

| | | | |
|---|---|---|---|
| SEQ | | | |
| ID | | | |
| NO | Medianprobe | Corr | Sequence |

| | | | |
|---|---|---|---|
| 2304 | MPR121 left | 0.3 | CACCTGGCTCTGAGAACTGAATTCCATAGGCTGTGAGCTC |
| 2305 | HUMTRS | 0.26 | TCTAGCGACAGAGTGGTTCAATTCCACCTTTCGGGCGCCA |
| 2306 | mir-213-precNo1 | 0.26 | AACATTCATTGCTGTCGGTGGGTTGAACTGTGTGGACAAG |
| 2307 | mir-155-prec | 0.4 | TTAATGCTAATCGTGATAGGGGTTTTTGCCTCCAACTGAC |
| 2308 | mir-147-prec | 0.47 | GACTATGGAAGCCAGTGTGTGGAAATGCTTCTGCTAGATT |
| 2309 | mir-100No1 | 0.26 | CCTGTTGCCACAAACCCGTAGATCCGAACTTGTGGTATTA |
| 2310 | mir-138-1-prec | 0.29 | AGCTGGTGTTGTGAATCAGGCCGTTGCCAATCAGAGAACG |
| 2311 | mir-140No2 | 0.38 | TTCTACCACAGGGTAGAACCACGGACAGGATACCGGGGCA |
| 2312 | mir-146-prec | 0.51 | TGAGAACTGAATTCCATGGGTTGTGTCAGTGTCAGACCTC |
| 2313 | mir-509No1 | 0.25 | ATTAAAAATGATTGGTACGTCTGTGGGTAGAGTACTGCAT |
| 2314 | mir-146bNo1 | 0.33 | CACCTGGCACTGAGAACTGAATTCCATAGGCTGTGAGCTC |
| 2315 | Hcd514 right | 0.26 | ATTAGAGACTCGTTAAGAGAAGGTGAGAAGGGCTCAGTAA |
| 2316 | Hcd397 left | 0.34 | GTGTGTATACTTATGTGTGTGTATGTGTGAGTGTGAATAT |
| 2317 | Hcd731 left | 0.27 | AATTGTGACAACTGAGTGGGAGGTTTGTGTGATGATTATC |
| 2318 | mir-034-precNo2 | 0.32 | AGTAAGGAAGCAATCAGCAAGTATACTGCCCTAGAAGTGC |
| 2319 | mir-100-1/2-prec | 0.3 | TGAGGCCTGTTGCCACAAACCCGTAGATCCGAACTTGTGG |

TABLE 83
Etoposide microRNA biomarkers.

| | | | |
|---|---|---|---|
| SEQ | | | |
| ID | | | |
| NO | Medianprobe | Corr | Sequence |

| | | | |
|---|---|---|---|
| 2320 | Hcd415 right | 0.28 | GATGTTTGGGAAACAATGGGAGTGAGAGAATGGGAGAGCT |
| 2321 | Hcd768 right | 0.37 | GCCCTGGCGGAACGCTGAGAAGACAGTCGAACTTGACTAT |
| 2322 | HUMTRF | 0.38 | GATCTAAAGGTCCCTGGTTCGATCCCGGGTTTCGGCACCA |
| 2323 | Hcd866 right | 0.26 | GTCATGCTGCCACCAGCAGGCAGAGAAGAAGCAGAAGAAC |
| 2324 | Hcd145 left | 0.33 | AAAAATCCCAGCGGCCACCTTTCCTCCCTGCCCCATTGGG |
| 2325 | HUMTRAB | 0.29 | ATGGTAGAGCGCTCGCTTTGCTTGCGAGAGGTAGCGGGAT |
| 2326 | Hcd913 right | 0.36 | CAAACATCATGTGACGTCTGTGGAGCGGCGGCGGCGGCGG |
| 2327 | HPR163 left | 0.29 | GCTGCCCCCTCCCTTAGCAACGTGGCCCCGGCGTTCCAAA |
| 2328 | Hcd697 right | 0.27 | GGCCTCATGCTGCCAAGGGCTGGCAAGAAGTCCCTGCTTG |
| 2329 | Hcd755 left | 0.26 | GGAAGTGGAGCAAATGGATGGAAAGCAATTTTTGGAAGAT |
| 2330 | Hcd716 right | 0.25 | CAATAAATGTGCCTATAAAGGCGCCGGCTCCGGGGCGCGG |
| 2331 | MPR207 right | 0.33 | AACAACTTTGTGCTGGTGCCGGGGAAGTTTGTGTCTCCTA |
| 2332 | HSTRNL | 0.26 | TCCGGATGGAGCGTGGGTTCGAATCCCACTTCTGACACCA |
| 2333 | HPR206 left | 0.29 | CTATATTGGACCGCAGCGCTGAGAGCTTTTGTGTTTAATG |
| 2334 | MPR243 left | 0.27 | GTATTTACCTAGTTGTAATGTGGGTTGCCATGGTGTTTTG |
| 2335 | Hcd654 left | 0.4 | AACGAGTAAAAGGCGTACATGGGAGCGCGGGGCGGCAGAG |
| 2336 | MPR130 left | 0.28 | AGGCCAAGGTGACGGGTGCGATTTCTGTGTGAGACAATTC |
| 2337 | Hcd782 left | 0.26 | GGAGCCCTGTCTGCAAAGAGTGGTGCGTGTGCGTGTGTGA |
| 2338 | Hcd794 right | 0.26 | GGCCACCACAGACACCAACAAGTTCAGTCCGTTTCTGCAG |
| 2339 | Hcd739 right | 0.3 | TATTAGCTGAGGGAGGGCTGGAGGCGGCTGCATTCCGACT |
| 2340 | mir-142-prec | 0.29 | CCCATAAAGTAGAAAGCACTACTAACAGCACTGGAGGGTG |
| 2341 | HSHELA01 | 0.29 | GGCCGCAGCAACCTCGGTTCGTATCCGAGTCACGGCACCA |
| 2342 | HUMTRV1A | 0.29 | ACGCGAAAGGTCCCCGGTTCGAAACCGGGCGGAAACACCA |
| 2343 | Hcd754 left | 0.34 | TCCTCCTCCTCCTTTTCGTTCCGGCTCCCTGGCTGGCTCC |

TABLE 84
Carboplatin microRNA biomarkers.

| | | | |
|---|---|---|---|
| SEQ | | | |
| ID | | | |
| NO | Medianprobe | Corr | Sequence |

| | | | |
|---|---|---|---|
| 2344 | Hcd829 right | 0.27 | AAAATGGCGGCGGGAAAAGCGAGCGGCGAGAGCGAGGAGG |
| 2345 | HUMTRF | 0.26 | GATCTAAAGGTCCCTGGTTCGATCCCGGGTTTCGGCACCA |
| 2346 | HPR187 left | 0.29 | TGTGTGTTGCGGGGGTGGGGGCCGGTGAAAGTGATTTGAT |
| 2347 | Hcd210_HPR205 right | 0.32 | CGAAACATTCGCGGTGCACTTCTTTTTCAGTATCCTATTC |
| 2348 | mir-379No1 | 0.26 | TTCCGTGGTTCCTGAAGAGATGGTAGACTATGGAACGTAG |
| 2349 | mir-213-precNo1 | 0.26 | AACATTCATTGCTGTCGGTGGGTTGAACTGTGTGGACAAG |
| 2350 | mir-4325p | 0.29 | CCAGGTCTTGGAGTAGGTCATTGGGTGGATCCTCTATTTC |
| 2351 | mir-450-1 | 0.3 | AACGATACTAAACTGTTTTTGCGATGTGTTCCTAATATGC |
| 2352 | mir-155-prec | 0.25 | TTAATGCTAATCGTGATAGGGGTTTTTGCCTCCAACTGAC |
| 2353 | Hcd28_HPR39right | 0.26 | AAGCTCCCAAATTAGCTTTTTAAATAGAAGCTGAGAGTTA |
| 2354 | MPR244 right | 0.27 | TAAACATAGAGGAAATTTCACGTTTTCAGTGTCAAATGCT |
| 2355 | mir-409-3p | 0.3 | GACGAATGTTGCTCGGTGAACCCCTTTTCGGTATCAAATT |
| 2356 | mir-124a-1-prec1 | 0.28 | ATACAATTAAGGCACGCGGTGAATGCCAAGAATGGGGCTG |
| 2357 | mir-154-prec1No1 | 0.26 | GTGGTACTTGAAGATAGGTTATCCGTGTTGCCTTCGCTTT |
| 2358 | mir-495No1 | 0.32 | GTGACGAAACAAACATGGTGCACTTCTTTTTCGGTATCAA |
| 2359 | mir-515-23p | 0.25 | CAGAGTGCCTTCTTTTGGAGCGTTACTGTTTGAGAAAAAC |
| 2360 | Hcd438 right | 0.27 | GTGTTTATTTGAATCTCACATCGCTCATAAGAATACACGC |
| 2361 | Hcd770 left | 0.3 | CCAGTATACAATCCGTTTTTCAGTTTAGCTTGAGATCAGA |
| 2362 | mir-382 | 0.32 | GGTACTTGAAGAGAAGTTGTTCGTGGTGGATTCGCTTTAC |
| 2363 | mir-223-prec | 0.3 | GAGTGTCAGTTTGTCAAATACCCCAAGTGCGGCACATGCT |
| 2364 | Hcd754 left | 0.48 | TCCTCCTCCTCCTTTTCGTTCCGGCTCCCTGGCTGGCTCC |
| 2365 | Hcd213_HPR182 left | 0.31 | CTGTTTCATACTTGAGGAGAAATTATCCTTGGTGTGTTCG |

TABLE 85
Adriamycin microRNA biomarkers.

| | | | |
|---|---|---|---|
| SEQ | | | |
| ID | | | |
| NO | Medianprobe | Corr | Sequence |

| | | | |
|---|---|---|---|
| 2366 | Hcd768 right | 0.25 | GCCCTGGCGGAACGCTGAGAAGACAGTCGAACTTGACTAT |
| 2367 | mir-483No1 | 0.28 | ATCACGCCTCCTCACTCCTCTCCTCCCGTCTTCTCCTCTC |
| 2368 | Hcd145 left | 0.28 | AAAAATCCCAGCGGCCACCTTTCCTCCCTGCCCCATTGGG |
| 2369 | mir-197-prec | 0.25 | TAAGAGCTCTTCACCCTTCACCACCTTCTCCACCCAGCAT |
| 2370 | mir-212-precNo1 | 0.27 | CCTCAGTAACAGTCTCCAGTCACGGCCACCGACGCCTGGC |
| 2371 | HPR163 left | 0.3 | GCTGCCCCCTCCCTTAGCAACGTGGCCCCGGCGTTCCAAA |
| 2372 | Hcd654 left | 0.26 | AACGAGTAAAAGGCGTACATGGGAGCGCGGGGCGGCAGAG |
| 2373 | mir-342No1 | 0.32 | GTCTCACACAGAAATCGCACCCGTCACCTTGGCCTACTTA |
| 2374 | Hcd794 right | 0.32 | GGCCACCACAGACACCAACAAGTTCAGTCCGTTTCTGCAG |
| 2375 | mir-142-prec | 0.38 | CCCATAAAGTAGAAAGCACTACTAACAGCACTGGAGGGTG |
| 2376 | Hcd754 left | 0.28 | TCCTCCTCCTCCTTTTCGTTCCGGCTCCCTGGCTGGCTCC |

TABLE 86
Aclarubicin microRNA biomarkers.

| | | | |
|---|---|---|---|
| SEQ | | | |
| ID | | | |
| NO | Medianprobe | Corr | Sequence |

| | | | |
|---|---|---|---|
| 2377 | mir-092-prec-X = 092-2 | 0.32 | GTTCTATATAAAGTATTGCACTTGTCCCGGCCTGTGGAAG |
| 2378 | mir-096-prec-7No2 | 0.29 | TGGCCGATTTTGGCACTAGCACATTTTTGCTTGTGTCTCT |
| 2379 | Hcd605 left | 0.26 | ATTACTAGCAGTTAATGATTGGTTTGTTAGTTAATGGCCC |
| 2380 | mir-007-2-precNo2 | 0.34 | GGACCGGCTGGCCCCATCTGGAAGACTAGTGATTTTGTTG |
| 2381 | mir-019b-2-prec | 0.28 | GTGGCTGTGCAAATCCATGCAAAACTGATTGTGATAATGT |
| 2382 | MPR216 left | 0.26 | GATCCTAGTAGTGCCAAAGTGCTCATAGTGCAGGTAGTTT |
| 2383 | mir-019b-1-prec | 0.25 | TTCTGCTGTGCAAATCCATGCAAAACTGACTGTGGTAGTG |
| 2384 | mir-135-2-prec | 0.26 | CACTCTAGTGCTTTATGGCTTTTTATTCCTATGTGATAGT |
| 2385 | HSTRNL | 0.26 | TCCGGATGGAGCGTGGGTTCGAATCCCACTTCTGACACCA |
| 2386 | mir-025-prec | 0.31 | ACGCTGCCCTGGGCATTGCACTTGTCTCGGTCTGACAGTG |
| 2387 | mir-007-1-prec | 0.4 | TGTTGGCCTAGTTCTGTGTGGAAGACTAGTGATTTTGTTG |
| 2388 | mir-019a-prec | 0.26 | TGTAGTTGTGCAAATCTATGCAAAACTGATGGTGGCCTGC |
| 2389 | mir-380-5p | 0.31 | AGGTACCTGAAAAGATGGTTGACCATAGAACATGCGCTAT |
| 2390 | mir-093-prec-7.1 = 093-1 | 0.37 | CCAAAGTGCTGTTCGTGCAGGTAGTGTGATTACCCAACCT |
| 2391 | mir-106-prec-X | 0.37 | CCTTGGCCATGTAAAAGTGCTTACAGTGCAGGTAGCTTTT |
| 2392 | mir-142-prec | 0.32 | CCCATAAAGTAGAAAGCACTACTAACAGCACTGGAGGGTG |
| 2393 | mir-018-prec | 0.31 | TAAGGTGCATCTAGTGCAGATAGTGAAGTAGATTAGCATC |
| 2394 | mir-020-prec | 0.36 | TAAAGTGCTTATAGTGCAGGTAGTGTTTAGTTATCTACTG |

TABLE 87
Mitoxantrone microRNA biomarkers.

| | | | |
|---|---|---|---|
| SEQ | | | |
| ID | | | |
| NO | Medianprobe | Corr | Sequence |

| | | | |
|---|---|---|---|
| 2395 | Hcd768 left | 0.26 | GATGGTTTAGTGAGGCCCTCGGATCAGCCCGCTGGGTCAG |
| 2396 | HUMTRF | 0.31 | GATCTAAAGGTCCCTGGTTCGATCCCGGGTTTCGGCACCA |
| 2397 | mir-213-precNo1 | 0.28 | AACATTCATTGCTGTCGGTGGGTTGAACTGTGTGGACAAG |
| 2398 | mir-181b-precNo1 | 0.26 | TGAGGTTGCTTCAGTGAACATTCAACGCTGTCGGTGAGTT |
| 2399 | M2R244 right | 0.27 | TAAACATAGAGGAAATTTCACGTTTTCAGTGTCAAATGCT |
| 2400 | mir-409-3p | 0.29 | GACGAATGTTGCTCGGTGAACCCCTTTTCGGTATCAAATT |
| 2401 | HSTRNL | 0.33 | TCCGGATGGAGCGTGGGTTCGAATCCCACTTCTGACACCA |
| 2402 | mir-382 | 0.34 | GGTACTTGAAGAGAAGTTGTTCGTGGTGGATTCGCTTTAC |
| 2403 | mir-342No1 | 0.3 | GTCTCACACAGAAATCGCACCCGTCACCTTGGCCTACTTA |
| 2404 | mir-142-prec | 0.27 | CCCATAAAGTAGAAAGCACTACTAACAGCACTGGAGGGTG |
| 2405 | Hcd200 right | 0.29 | CAATTAGCCAATTGTGGGTATAATTAGCTGCATGTAGAAT |

TABLE 88
Mitomycin microRNA biomarkers.

| SEQ | | | |
|---|---|---|---|
| ID | | | |
| NO | Medianprobe | Corr | Sequence |
| 2406 | HUMTRF | 0.26 | GATCTAAAGGTCCCTGGTTCGATCCCGGGTTTCGGCACCA |
| 2407 | Hcd148_HPR225left | 0.27 | AATTAATGACCAAAATGTCAGATGTGTCCACAGCTAATTA |
| 2408 | Hcd938 right | 0.26 | ATTCCCTGCATCACTCTCATGAAATGGCTGAGAAAGTGAG |
| 2409 | MPR174 left | 0.32 | GAGCCGGTCTCTTTACATCTCAAATACCAGGTATTTAGGT |
| 2410 | mir-4323p | 0.29 | CCTTACGTGGGCCACTGGATGGCTCCTCCATGTCTTGGAG |

TABLE 89
Paclitaxel (Taxol) microRNA biomarkers.

| | | | |
|---|---|---|---|
| SEQ | | | |
| ID | | | |
| NO | Medianprobe | Corr | Sequence |

| | | | |
|---|---|---|---|
| 2411 | mir-092-prec-X = 092-2 | 0.29 | GTTCTATATAAAGTATTGCACTTGTCCCGGCCTGTGGAAG |
| 2412 | mir-096-prec-7No1 | 0.36 | CTCCGCTCTGAGCAATCATGTGCAGTGCCAATATGGGAAA |
| 2413 | mir-101-prec-9 | 0.38 | GCTGTATATCTGAAAGGTACAGTACTGTGATAACTGAAGA |
| 2414 | mir-20bNo1 | 0.28 | AGTACCAAAGTGCTCATAGTGCAGGTAGTTTTGGCATGAC |
| 2415 | mir-019b-2-prec | 0.28 | GTGGCTGTGCAAATCCATGCAAAACTGATTGTGATAATGT |
| 2416 | mir-032-precNo2 | 0.29 | GGAGATATTGCACATTACTAAGTTGCATGTTGTCACGGCC |
| 2417 | MPR156 left | 0.25 | TCCCTCACTTGAACTGACTGCCAGAGTTCACAGACAGCTG |
| 2418 | mir-019b-1-prec | 0.28 | TTCTGCTGTGCAAATCCATGCAAAACTGACTGTGGTAGTG |
| 2419 | mir-135-2-prec | 0.36 | CACTCTAGTGCTTTATGGCTTTTTATTCCTATGTGATAGT |
| 2420 | mir-025-prec | 0.36 | ACGCTGCCCTGGGCATTGCACTTGTCTCGGTCTGACAGTG |
| 2421 | mir-007-1-prec | 0.27 | TGTTGGCCTAGTTCTGTGTGGAAGACTAGTGATTTTGTTG |
| 2422 | mir-361No1 | 0.29 | GGATTTGGGAGCTTATCAGAATCTCCAGGGGTACTTTATA |
| 2423 | mir-093-prec-7.1 = 093-1 | 0.37 | CCAAAGTGCTGTTCGTGCAGGTAGTGTGATTACCCAACCT |
| 2424 | mir-106-prec-X | 0.38 | CCTTGGCCATGTAAAAGTGCTTACAGTGCAGGTAGCTTTT |
| 2425 | mir-098-prec-X | 0.29 | TGAGGTAGTAAGTTGTATTGTTGTGGGGTAGGGATATTAG |
| 2426 | mir-142-prec | 0.27 | CCCATAAAGTAGAAAGCACTACTAACAGCACTGGAGGGTG |
| 2427 | HPR169 right | 0.26 | GTTTCTTTCTCACGGTAACTGGCAGCCTCGTTGTGGGCTG |
| 2428 | mir-018-prec | 0.4 | TAAGGTGCATCTAGTGCAGATAGTGAAGTAGATTAGCATC |
| 2429 | mir-020-prec | 0.36 | TAAAGTGCTTATAGTGCAGGTAGTGTTTAGTTATCTACTG |

TABLE 90
Gemcitabine (Gemzar) microRNA biomarkers.

| | | | |
|---|---|---|---|
| SEQ | | | |
| ID | | | |
| NO | Medianprobe | Corr | Sequence |

| | | | |
|---|---|---|---|
| 2430 | mir-123-precNo2 | 0.27 | TGTGACACTTCAAACTCGTACCGTGAGTAATAATGCGCCG |
| 2431 | Hcd257 right | 0.29 | CTTGGTTTTTGCAATAATGCTAGCAGAGTACACACAAGAA |
| 2432 | mir-155-prec | 0.35 | TTAATGCTAATCGTGATAGGGGTTTTTGCCTCCAACTGAC |
| 2433 | ath-MIR180aNo2 | 0.26 | TGAGAATCTTGATGATGCTGCATCGGCAATCAACGACTAT |
| 2434 | Hcd448 left | 0.33 | TGTAATTCCATTGAGGGTTTCTGGTGACTCCAGCTTCGTA |
| 2435 | HSTRNL | 0.31 | TCCGGATGGAGCGTGGGTTCGAATCCCACTTCTGACACCA |
| 2436 | MPR174 right | 0.29 | CATTAGGGACACGTGTGAGTGTGCCAGGCTCATTCCTGAG |
| 2437 | Hcd200 right | 0.29 | CAATTAGCCAATTGTGGGTATAATTAGCTGCATGTAGAAT |
| 2438 | mir-4323p | 0.26 | CCTTACGTGGGCCACTGGATGGCTCCTCCATGTCTTGGAG |
| 2439 | HPR244 right | 0.3 | TAGTTCATGGCGTCCAGCAGCAGCTTCTGGCAGACCGGGT |

TABLE 91
Taxotere (docetaxel) microRNA biomarkers.

| SEQ | | | |
|---|---|---|---|
| ID | | | |
| NO | Medianprobe | Corr | Sequence |
| 2440 | mir-096-prec-7No1 | 0.28 | CTCCGCTCTGAGCAATCATGTGCAGTGCCAATATGGGAAA |
| 2441 | mir-095-prec-4 | 0.27 | CGTTACATTCAACGGGTATTTATTGAGCACCCACTCTGTG |
| 2442 | HSTRNL | 0.26 | TCCGGATGGAGCGTGGGTTCGAATCCCACTTCTGACACCA |
| 2443 | mir-007-1-prec | 0.37 | TGTTGGCCTAGTTCTGTGTGGAAGACTAGTGATTTTGTTG |

TABLE 392
Dexamethasone microRNA biomarkers.

| SEQ | | | |
|---|---|---|---|
| ID | | | |
| NO | Medianprobe | Corr | Sequence |
| 2444 | MPR141 left | 0.42 | CTCAGTCGTGCCCTAGCAGCGGGAACAGTACTGCAGTGAG |
| 2445 | mir-424No2 | 0.35 | GTTCAAAACGTGAGGCGCTGCTATACCCCCTCGTGGGGAA |
| 2446 | Hcd690 right | 0.26 | GGACAAGGGAGGAGACACGCAGAGGTGACAGAAAGGTTAG |
| 2447 | Hcd783 left | 0.26 | CAGGCTCACACCTCCCTCCCCCAACTCTCTGGAATGTATA |
| 2448 | mir-150-prec | 0.38 | CTCCCCATGGCCCTGTCTCCCAACCCTTGTACCAGTGCTG |
| 2449 | Hcd266 left | 0.37 | AAGGTCTTTGGTCTTGGAGGAAGGTGTGCTACTGGAAGAG |
| 2450 | mir-503No1 | 0.34 | CTCAGCCGTGCCCTAGCAGCGGGAACAGTTCTGCAGTGAG |
| 2451 | mir-128b-precNo1 | 0.29 | TCACAGTGAACCGGTCTCTTTCCCTACTGTGTCACACTCC |
| 2452 | Hcd397 left | 0.26 | GTGTGTATACTTATGTGTGTGTATGTGTGAGTGTGAATAT |
| 2453 | mir-484 | 0.38 | GTCAGGCTCAGTCCCCTCCCGATAAACCCCTAAATAGGGA |

TABLE 93
Ara-C (Cytarabine hydrochloride) microRNA biomarkers.

| SEQ | | | |
|---|---|---|---|
| ID | | | |
| NO | Medianprobe | Corr | Sequence |
| 2454 | HUMTRF | 0.33 | GATCTAAAGGTCCCTGGTTCGATCCCGGGTTTCGGCACCA |
| 2455 | mir-155-prec | 0.28 | TTAATGCTAATCGTGATAGGGGTTTTTGCCTCCAACTGAC |
| 2456 | mir-515-15p | 0.27 | GATCTCATGCAGTCATTCTCCAAAAGAAAGCACTTTCTGT |
| 2457 | Hcd938 right | 0.26 | ATTCCCTGCATCACTCTCATGAAATGGCTGAGAAAGTGAG |
| 2458 | Hcd642 right | 0.25 | TCAGGGTTTATGAAGTTATCAAAGCCCCTTGATGGAATTA |
| 2459 | Hcd120 left | 0.26 | CTTGGTGTGTTCTCGGTAGCTATGGAAATCCCAGGGTTTC |
| 2460 | mir-380-5p | 0.25 | AGGTACCTGAAAAGATGGTTGACCATAGAACATGCGCTAT |
| 2461 | mir-342No1 | 0.25 | GTCTCACACAGAAATCGCACCCGTCACCTTGGCCTACTTA |
| 2462 | mir-142-prec | 0.27 | CCCATAAAGTAGAAAGCACTACTAACAGCACTGGAGGGTG |
| 2463 | mir-223-prec | 0.31 | GAGTGTCAGTTTGTCAAATACCCCAAGTGCGGCACATGCT |
| 2464 | mir-4323p | 0.28 | CCTTACGTGGGCCACTGGATGGCTCCTCCATGTCTTGGAG |

TABLE 94
Methylprednisolone microRNA biomarkers.

| | | | |
|---|---|---|---|
| SEQ | | | |
| ID | | | |
| NO | Medianprobe | Corr | Sequence |

| | | | |
|---|---|---|---|
| 2465 | Hcd544 left | 0.26 | TTCCAGGTGTCCACCAAGGACGTGCCGCTGGCGCTGATGG |
| 2466 | mir-181c-precNo1 | 0.28 | TGCCAAGGGTTTGGGGGAACATTCAACCTGTCGGTGAGTT |
| 2467 | Hcd517 left | 0.25 | TTAAAGCAGGAGAGGTGAGAGGAAGAATTAATGTGTGCTC |
| 2468 | MPR151 left | 0.27 | GGGATTAATGACCAGCTGGGGGAGTTGATAGCCCTCAGTG |
| 2469 | mir-213-precNo1 | 0.34 | AACATTCATTGCTGTCGGTGGGTTGAACTGTGTGGACAAG |
| 2470 | mir-181b-precNo2 | 0.36 | ACCATCGACCGTTGATTGTACCCTATGGCTAACCATCATC |
| 2471 | mir-150-prec | 0.27 | CTCCCCATGGCCCTGTCTCCCAACCCTTGTACCAGTGCTG |
| 2472 | mir-153-1-prec1 | 0.28 | CAGTTGCATAGTCACAAAAGTGATCATTGGCAGGTGTGGC |
| 2473 | mir-128b-precNo1 | 0.48 | TCACAGTGAACCGGTCTCTTTCCCTACTGTGTCACACTCC |
| 2474 | Hcd812 left | 0.25 | CTGTGGGATCTGGTTCTGTAGCTGAGAGCACATCGCTAAA |
| 2475 | mir-195-prec | 0.3 | TCTAGCAGCACAGAAATATTGGCACAGGGAAGCGAGTCTG |
| 2476 | mir-342No1 | 0.38 | GTCTCACACAGAAATCGCACCCGTCACCTTGGCCTACTTA |
| 2477 | mir-370No1 | 0.28 | TTACACAGCTCACGAGTGCCTGCTGGGGTGGAACCTGGTC |
| 2478 | mir-142-prec | 0.32 | CCCATAAAGTAGAAAGCACTACTAACAGCACTGGAGGGTG |
| 2479 | mir-223-prec | 0.36 | GAGTGTCAGTTTGTCAAATACCCCAAGTGCGGCACATGCT |
| 2480 | mir-484 | 0.36 | GTCAGGCTCAGTCCCCTCCCGATAAACCCCTAAATAGGGA |

TABLE 95
Methotrexate microRNA biomarkers.

| | | | |
|---|---|---|---|
| SEQ | | | |
| ID | | | |
| NO | Medianprobe | Corr | Sequence |

| | | | |
|---|---|---|---|
| 2481 | mir-092-prec-X = 092-2 | 0.37 | GTTCTATATAAAGTATTGCACTTGTCCCGGCCTGTGGAAG |
| 2482 | mir-096-prec-7No1 | 0.33 | CTCCGCTCTGAGCAATCATGTGCAGTGCCAATATGGGAAA |
| 2483 | mir-123-precNo1 | 0.25 | GACGGGACATTATTACTTTTGGTACGCGCTGTGACACTTC |
| 2484 | Hcd250 left | 0.26 | GTTCTGTTGCTAAGACAACAGGATGCTAGCAGGCATATGC |
| 2485 | mir-518e/526c | 0.3 | TCTCAGGCTGTGACCCTCTAGAGGGAAGCGCTTTCTGTTG |
| 2486 | HPR232 right | 0.3 | TGAATTATTGCACAATAAATTCATGCCCTCTTGTGTCTTA |
| 2487 | Hcd263 left | 0.29 | GAGCATTAAGATTTCCTATTCTTTGAGGCAAATATTGACC |
| 2488 | mir-516-33p | 0.35 | GTGAAAGAAAGTGCTTCCTTTCAGAGGGTTACTCTTTGAG |
| 2489 | Hcd605 left | 0.27 | ATTACTAGCAGTTAATGATTGGTTTGTTAGTTAATGGCCC |
| 2490 | Hcd373 right | 0.25 | CCTGAAAGGTCTGGTGTTAAGCAAATACTCGGTGACCAGA |
| 2491 | MPR254 right | 0.28 | GTTCACAGTGGGAGAAATATGCTTCGTATTACTCTTTCTC |
| 2492 | MPR215 left | 0.3 | CAGCTATGTGGACTCTAGCTGCCAAAGGCGCTTCTCCTTC |
| 2493 | HUMTRF | 0.28 | GATCTAAAGGTCCCTGGTTCGATCCCGGGTTTCGGCACCA |
| 2494 | mir-106aNo1 | 0.27 | CCTTGGCCATGTAAAAGTGCTTACAGTGCAGGTAGCTTTT |
| 2495 | mir-20bNo1 | 0.37 | AGTACCAAAGTGCTCATAGTGCAGGTAGTTTTGGCATGAC |
| 2496 | Hcd361 right | 0.28 | AACTTGGCTACAAGGCTCTTTCCCTCTCTATGAAGGACAG |
| 2497 | Hcd412 left | 0.25 | AGTTGGGGAGAACTTTATGATTATTCTCATGCATCATCTT |
| 2498 | Hcd781 left | 0.26 | GAGTGTGGATCTAATCTTCAGCTGATTAAATGTCCCTCAT |
| 2499 | mir-019b-2-prec | 0.33 | GTGGCTGTGCAAATCCATGCAAAACTGATTGTGATAATGT |
| 2500 | HPR214 right | 0.29 | AGCAAAAGCTATTATTTGCCCTTGATGAGCCAATCAGATG |
| 2501 | Hcd807 right | 0.26 | GCGCTGACAAATCTTGCCTGATTCTGTATGATCCATGAGA |
| 2502 | Hcd817 left | 0.37 | TAATGAGAATTATGTTTGCACATTGAGGCAGGATAAATCC |
| 2503 | Hcd788 left | 0.25 | GACAAACATGCAGGAAAAATTATCCCCTGGGGATTCTACA |
| 2504 | Hcd970 left | 0.31 | TTGTGGGTCAGCTGCCCAGCTATCGGCTGGATTAGTGAAT |
| 2505 | Hcd148_HPR225left | 0.26 | AATTAATGACCAAAATGTCAGATGTGTCCACAGCTAATTA |
| 2506 | Hcd102 left | 0.27 | ACTGGAATTATGTTTTATCTTAAGTCCACACTGGATCCTC |
| 2507 | Hcd246 right | 0.29 | TAAAGTGAGTTATGGAGGTTACTCTCCTGTGAGAGGAAAT |
| 2508 | HPR199 right | 0.28 | TACACCTAAGGCATGTACTGTATTAATGAACCAATAAAAC |
| 2509 | HPR233 right | 0.27 | CATGATGGGGTGGGGTGAGATGGGGAGCGAAGACTATTAC |
| 2510 | Hcd383 left | 0.28 | GCCCGGGCATGCATTTTATCTAGCACCATGTGTTTCAGCT |
| 2511 | MPR224 right | 0.29 | TGAATTATTGCACAATAAATTCATGCCCTGTTGTGTCTTA |
| 2512 | HPR172 right | 0.26 | GTTTAAACAGCCAGTGCAAACATTTAGATCTGAGTCAAAA |
| 2513 | MPR216 left | 0.34 | GATCCTAGTAGTGCCAAAGTGCTCATAGTGCAGGTAGTTT |
| 2514 | mir-321No2 | 0.25 | CAGGGATTGTGGGTTCGAGTCCCACCCGGGGTAAAGAAAG |
| 2515 | Hcd586 right | 0.28 | GAACTGTTTGCTTTGGATGGGCTTGGTCCTCATTGGCTGA |
| 2516 | Hcd587 right | 0.3 | AAATAATGACTGGCCATAAGATCAAGACAAGTGTCCAAAG |
| 2517 | Hcd249 right | 0.39 | CAGGTACATGTTGATCAGCAGGGGCTGGGAGGCGCCGCTC |
| 2518 | Hcd279 right | 0.27 | CTCACGGCGTTGCCATGGAGACAACTCCGGGGCTGGGGCTC |
| 2519 | HPR159 left | 0.3 | TCCGTCACTTGAACTGGCTGCCAGCGTTCACAGACAGCTG |
| 2520 | Hcd689 right | 0.28 | GTACATCTGGATGTAGTTGTGCTGCAGCTGCTTCTGGTAG |
| 2521 | Hcd691 right | 0.32 | CGGCAAAAACCTCTGTCAGAACAAAATTAGGTGATCTATC |
| 2522 | mir-019b-1-prec | 0.32 | TTCTGCTGTGCAAATCCATGCAAAACTGACTGTGGTAGTG |
| 2523 | Hcd413 right | 0.26 | CACAAAAAGGCATAAGCAGACATCTTGCCCTTTGGTTTCT |
| 2524 | Hcd581 right | 0.26 | AGGAGATATGCCAAGATATATTCACAGCTTTATATACACA |
| 2525 | Hcd536_HPR104 right | 0.28 | GCTGCTCTGCTGAGGGGCTGGACTCTGTCCAGAAGCACCA |
| 2526 | Hcd230 left | 0.28 | CATTCTCTACAAGCATATGGCCTTGGGACATTAAGATGGC |
| 2527 | HPR154 left | 0.28 | AACATCAAGATCTATTGACCTGAGAGGTAAATATTGACCG |
| 2528 | Hcd270 right | 0.31 | AAATGTTGTTATAGTATCCCACCTACCCTGATGTATCTTT |
| 2529 | Hcd649 right | 0.26 | GAACAGGCTTCAAGGTTCTTGGCAGGAATATTCCGTGTAG |
| 2530 | Hcd889 right | 0.27 | ATGCCTTGTGCTCTGTGCTAATTCAGAAGAATAAGCCTGT |
| 2531 | Hcd938 left | 0.36 | CTTGTCGACTAGCCAGTTATGAACAGAGGAGGATGTTCTC |
| 2532 | HPR266 right | 0.32 | GGAGATCCCTTCAAGGTACTTAGTTTTAAATGAGTGCTCT |
| 2533 | mir-025-prec | 0.39 | ACGCTGCCCTGGGCATTGCACTTGTCTCGGTCTGACAGTG |
| 2534 | Hcd355_HPR190 left | 0.25 | TTGTGCACTGCACAACCCTAGTGGCGCCATTCAATTATAG |
| 2535 | MPR162 left | 0.26 | CTCTCTTTTTCCTGCTTGATTTGCCTAATGGAAGCTGACA |
| 2536 | Hcd923 right | 0.34 | CTGGAGATAATGATTCTGCATTTCTAATTAACTCCCAGGT |
| 2537 | MPR237 left | 0.32 | AGCACATCCCATGATCACAGTAATGTTCTTTGGAGATGTA |
| 2538 | MPR174 left | 0.32 | GAGCCGGTCTCTTTACATCTCAAATACCAGGTATTTAGGT |
| 2539 | mir-019a-prec | 0.31 | TGTAGTTGTGCAAATCTATGCAAAACTGATGGTGGCCTGC |
| 2540 | hsa_mir_490_Hcd20 right | 0.25 | ACCAACCTGGAGGACTCCATGCTGTTGAGCTGTTCACAAG |
| 2541 | mir-380-5p | 0.36 | AGGTACCTGAAAAGATGGTTGACCATAGAACATGCGCTAT |
| 2542 | mir-093-prec-7.1 = 093-1 | 0.38 | CCAAAGTGCTGTTCGTGCAGGTAGTGTGATTACCCAACCT |
| 2543 | mir-106-prec-X | 0.45 | CCTTGGCCATGTAAAAGTGCTTACAGTGCAGGTAGCTTTT |
| 2544 | Hcd627 left | 0.3 | GCATTAGGGAGAATAGTTGATGGATTACAAATCTCTGCAT |
| 2545 | mir-142-prec | 0.27 | CCCATAAAGTAGAAAGCACTACTAACAGCACTGGAGGGTG |
| 2546 | HPR169 right | 0.29 | GTTTCTTTCTCACGGTAACTGGCAGCCTCGTTGTGGGCTG |
| 2547 | mir-001b-2-prec | 0.28 | TAAGCTATGGAATGTAAAGAAGTATGTATCTCAGGCCGGG |
| 2548 | mir-018-prec | 0.4 | TAAGGTGCATCTAGTGCAGATAGTGAAGTAGATTAGCATC |
| 2549 | mir-020-prec | 0.48 | TAAAGTGCTTATAGTGCAGGTAGTGTTTAGTTATCTACTG |
| 2550 | Hcd404 left | 0.29 | TGCTGCTGTTAATGCCATTAGGATGACTATTTATATCACC |
| 2551 | mir-384 | 0.25 | CATAAGTCATTCCTAGAAATTGTTCATAATGCCTGTAACA |
| 2552 | mir-4323p | 0.4 | CCTTACGTGGGCCACTGGATGGCTCCTCCATGTCTTGGAG |

TABLE 96
Bleomycin microRNA biomarkers.

| | | | |
|---|---|---|---|
| SEQ | | | |
| ID | | | |
| NO | Medianprobe | Corr | Sequence |

| | | | |
|---|---|---|---|
| 2553 | mir-376aNo1 | 0.27 | AATCATAGAGGAAAATCCACGTTTTCAGTATCAAATGCTG |
| 2554 | mir-155-prec | 0.35 | TTAATGCTAATCGTGATAGGGGTTTTTGCCTCCAACTGAC |
| 2555 | mir-409-3p | 0.28 | GACGAATGTTGCTCGGTGAACCCCTTTTCGGTATCAAATT |
| 2556 | mir-495No1 | 0.29 | GTGACGAAACAAACATGGTGCACTTCTTTTTCGGTATCAA |
| 2557 | Hcd498 right | 0.28 | CACGAAGAAGTTCAGCAACCAGGAGACCAGGTGGGGGCCG |
| 2558 | mir-199a-2-prec | 0.41 | TCGCCCCAGTGTTCAGACTACCTGTTCAGGACAATGCCGT |
| 2559 | mir-382 | 0.3 | GGTACTTGAAGAGAAGTTGTTCGTGGTGGATTCGCTTTAC |
| 2560 | HPR271 right | 0.27 | AATTGAGCAAACAGTGCAATTTTCTGTAATTATGCCAGTG |
| 2561 | mir-145-prec | 0.31 | CCTCACGGTCCAGTTTTCCCAGGAATCCCTTAGATGCTAA |
| 2562 | mir-199a-1-prec | 0.35 | GCCAACCCAGTGTTCAGACTACCTGTTCAGGAGGCTCTCA |

TABLE 97

Methyl-GAG (methyl glyoxal bis amidinohydrazone dihydrochloride)
microRNA biomarkers.

| | | | |
|---|---|---|---|
| SEQ | | | |
| ID | | | |
| NO | Medianprobe | Corr | Sequence |

| | | | |
|---|---|---|---|
| 2563 | mir-092-prec-X = 092-2 | 0.32 | GTTCTATATAAAGTATTGCACTTGTCCCGGCCTGTGGAAG |
| 2564 | mir-101-prec-9 | 0.3 | GCTGTATATCTGAAAGGTACAGTACTGTGATAACTGAAGA |
| 2565 | mir-144-precNo2 | 0.29 | CCCTGGCTGGGATATCATCATATACTGTAAGTTTGCGATG |
| 2566 | mir-519a-1/526c | 0.29 | TCAGGCTGTGACACTCTAGAGGGAAGCGCTTTCTGTTGTC |
| 2567 | mir-519b | 0.33 | GAAAAGAAAGTGCATCCTTTTAGAGGTTTACTGTTTGAGG |
| 2568 | mir-015b-precNo2 | 0.26 | TGCTACAGTCAAGATGCGAATCATTATTTGCTGCTCTAGA |
| 2569 | mir-106aNo1 | 0.27 | CCTTGGCCATGTAAAAGTGCTTACAGTGCAGGTAGCTTTT |
| 2570 | mir-16-1No1 | 0.26 | GTCAGCAGTGCCTTAGCAGCACGTAAATATTGGCGTTAAG |
| 2571 | mir-181dNo1 | 0.27 | GAGGTCACAATCAACATTCATTGTTGTCGGTGGGTTGTGA |
| 2572 | mir-017-precNo2 | 0.31 | GTCAGAATAATGTCAAAGTGCTTACAGTGCAGGTAGTGAT |
| 2573 | mir-019b-2-prec | 0.32 | GTGGCTGTGCAAATCCATGCAAAACTGATTGTGATAATGT |
| 2574 | mir-192No2 | 0.26 | TGCCAATTCCATAGGTCACAGGTATGTTCGCCTCAATGCC |
| 2575 | mir-213-precNo1 | 0.25 | AACATTCATTGCTGTCGGTGGGTTGAACTGTGTGGACAAG |
| 2576 | mir-215-precNo2 | 0.3 | CATTTCTTTAGGCCAATATTCTGTATGACTGTGCTACTTC |
| 2577 | mir-107No1 | 0.28 | GGCATGGAGTTCAAGCAGCATTGTACAGGGCTATCAAAGC |
| 2578 | mir-200bNo1 | 0.28 | GTCTCTAATACTGCCTGGTAATGATGACGGCGGAGCCCTG |
| 2579 | mir-103-prec-5 = 103-1 | 0.3 | TATGGATCAAGCAGCATTGTACAGGGCTATGAAGGCATTG |
| 2580 | mir-519a-1/526c | 0.37 | TCAGGCTGTGACACTCTAGAGGGAAGCGCTTTCTGTTGTC |
| 2581 | MPR216 left | 0.28 | GATCCTAGTAGTGCCAAAGTGCTCATAGTGCAGGTAGTTT |
| 2582 | mir-019b-1-prec | 0.31 | TTCTGCTGTGCAAATCCATGCAAAACTGACTGTGGTAGTG |
| 2583 | mir-107-prec-10 | 0.29 | GGCATGGAGTTCAAGCAGCATTGTACAGGGCTATCAAAGC |
| 2584 | mir-135-2-prec | 0.39 | CACTCTAGTGCTTTATGGCTTTTTATTCCTATGTGATAGT |
| 2585 | mir-103-2-prec | 0.29 | GTAGCATTCAGGTCAAGCAACATTGTACAGGGCTATGAAA |
| 2586 | mir-519a-2No2 | 0.29 | TCTCAGGCTGTGTCCCTCTACAGGGAAGCGCTTTCTGTTG |
| 2587 | mir-025-prec | 0.33 | ACGCTGCCCTGGGCATTGCACTTGTCTCGGTCTGACAGTG |
| 2588 | mir-16-2No1 | 0.33 | GTTCCACTCTAGCAGCACGTAAATATTGGCGTAGTGAAAT |
| 2589 | MPR95 left | 0.28 | TTGTTGGACACTCTTTCCCTGTTGCACTACTGTGGGCCTC |
| 2590 | mir-016b-chr3 | 0.29 | GTTCCACTCTAGCAGCACGTAAATATTGGCGTAGTGAAAT |
| 2591 | Hcd948 right | 0.27 | TGATATAAATAGTCATCCTAATGGCATTAACAGCAGCACT |
| 2592 | mir-195-prec | 0.35 | TCTAGCAGCACAGAAATATTGGCACAGGGAAGCGAGTCTG |
| 2593 | mir-093-prec-7.1 = 093 - 1 | 0.38 | CCAAAGTGCTGTTCGTGCAGGTAGTGTGATTACCCAACCT |
| 2594 | mir-106-prec-X | 0.42 | CCTTGGCCATGTAAAAGTGCTTACAGTGCAGGTAGCTTTT |
| 2595 | mir-142-prec | 0.37 | CCCATAAAGTAGAAAGCACTACTAACAGCACTGGAGGGTG |
| 2596 | mir-519c/526c | 0.27 | TCTCAGCCTGTGACCCTCTAGAGGGAAGCGCTTTCTGTTG |
| 2597 | mir-200a-prec | 0.29 | GTCTCTAATACTGCCTGGTAATGATGACGGCGGAGCCCTG |
| 2598 | mir-016a-chr13 | 0.29 | CAATGTCAGCAGTGCCTTAGCAGCACGTAAATATTGGCGT |
| 2599 | mir-018-prec | 0.41 | TAAGGTGCATCTAGTGCAGATAGTGAAGTAGATTAGCATC |
| 2600 | mir-020-prec | 0.39 | TAAAGTGCTTATAGTGCAGGTAGTGTTTAGTTATCTACTG |

TABLE 98
pXD101 HDAC inhibitors microRNA biomarkers.

| | | | |
|---|---|---|---|
| SEQ | | | |
| ID | | | |
| NO | Medianprobe | Corr | Sequence |

| | | | |
|---|---|---|---|
| 2601 | mir-092-prec-X = 092-2 | 0.42 | GTTCTATATAAAGTATTGCACTTGTCCCGGCCTGTGGAAG |
| 2602 | mir-123-precNo2 | 0.31 | TGTGACACTTCAAACTCGTACCGTGAGTAATAATGCGCCG |
| 2603 | mir-106aNo1 | 0.36 | CCTTGGCCATGTAAAAGTGCTTACAGTGCAGGTAGCTTTT |
| 2604 | mir-20bNo1 | 0.36 | AGTACCAAAGTGCTCATAGTGCAGGTAGTTTTGGCATGAC |
| 2605 | mir-017-precNo2 | 0.32 | GTCAGAATAATGTCAAAGTGCTTACAGTGCAGGTAGTGAT |
| 2606 | mir-019b-2-prec | 0.42 | GTGGCTGTGCAAATCCATGCAAAACTGATTGTGATAATGT |
| 2607 | mir-033-prec | 0.3 | GTGGTGCATTGTAGTTGCATTGCATGTTCTGGTGGTACCC |
| 2608 | mir-092-prec-13 = 092-1No2 | 0.31 | TCTGTATGGTATTGCACTTGTCCCGGCCTGTTGAGTTTGG |
| 2609 | mir-122a-prec | 0.29 | CCTTAGCAGAGCTGTGGAGTGTGACAATGGTGTTTGTGTC |
| 2610 | Hcd783 left | 0.27 | CAGGCTCACACCTCCCTCCCCCAACTCTCTGGAATGTATA |
| 2611 | MPR216 left | 0.29 | GATCCTAGTAGTGCCAAAGTGCTCATAGTGCAGGTAGTTT |
| 2612 | mir-019b-1-prec | 0.41 | TTCTGCTGTGCAAATCCATGCAAAACTGACTGTGGTAGTG |
| 2613 | mir-135-2-prec | 0.46 | CACTCTAGTGCTTTATGGCTTTTTATTCCTATGTGATAGT |
| 2614 | mir-128b-precNo1 | 0.39 | TCACAGTGAACCGGTCTCTTTCCCTACTGTGTCACACTCC |
| 2615 | mir-025-prec | 0.45 | ACGCTGCCCTGGGCATTGCACTTGTCTCGGTCTGACAGTG |
| 2616 | Hcd511 right | 0.26 | TACCTCAGAAGCCTCACTCAACCCTCTCCCGCTGAGTCTC |
| 2617 | mir-093-prec-7.1 = 093-1 | 0.45 | CCAAAGTGCTGTTCGTGCAGGTAGTGTGATTACCCAACCT |
| 2618 | mir-106-prec-X | 0.5 | CCTTGGCCATGTAAAAGTGCTTACAGTGCAGGTAGCTTTT |
| 2619 | mir-142-prec | 0.5 | CCCATAAAGTAGAAAGCACTACTAACAGCACTGGAGGGTG |
| 2620 | HPR169 right | 0.26 | GTTTCTTTCTCACGGTAACTGGCAGCCTCGTTGTGGGCTG |
| 2621 | mir-223-prec | 0.26 | GAGTGTCAGTTTGTCAAATACCCCAAGTGCGGCACATGCT |
| 2622 | mir-018-prec | 0.48 | TAAGGTGCATCTAGTGCAGATAGTGAAGTAGATTAGCATC |
| 2623 | mir-020-prec | 0.52 | TAAAGTGCTTATAGTGCAGGTAGTGTTTAGTTATCTACTG |

TABLE 99
5-Fluorouracil microRNA biomarkers.

| | | | |
|---|---|---|---|
| SEQ | | | |
| ID | | | |
| NO | Medianprobe | Corr | Sequence |

| | | | |
|---|---|---|---|
| 2624 | mir-096-prec-7No2 | 0.27 | TGGCCGATTTTGGCACTAGCACATTTTTGCTTGTGTCTCT |
| 2625 | mir-429No1 | 0.25 | CTAATACTGTCTGGTAAAACCGTCCATCCGCTGCCTGATC |
| 2626 | Hcd693 right | 0.25 | AGGCTTTGTGCGCGCATTAAAGCTCGCCGGACCCCCGACC |
| 2627 | HPR214 right | 0.27 | AGCAAAAGCTATTATTTGCCCTTGATGAGCCAATCAGATG |
| 2628 | Hcd586 left | 0.26 | GTCCTGTCTAAAGGAAGAAGTTTGTTCTACTGTAAACAGT |
| 2629 | Hcd249 right | 0.26 | CAGGTACATGTTGATCAGCAGGGGCTGGGAGGCGCCGCTC |
| 2630 | Hcd689 right | 0.27 | GTACATCTGGATGTAGTTGTGCTGCAGCTGCTTCTGGTAG |
| 2631 | mir-194-2No1 | 0.25 | TGGTTCCCGCCCCCTGTAACAGCAACTCCATGTGGAAGTG |
| 2632 | Hcd581 right | 0.26 | AGGAGATATGCCAAGATATATTCACAGCTTTATATACACA |
| 2633 | Hcd270 right | 0.3 | AAATGTTGTTATAGTATCCCACCTACCCTGATGTATCTTT |
| 2634 | mir-025-prec | 0.27 | ACGCTGCCCTGGGCATTGCACTTGTCTCGGTCTGACAGTG |
| 2635 | Hcd340 left | 0.27 | GGACAATTCAACAGTGGTGAGTCACTTCGCCACTTTTCAG |
| 2636 | mir-007-1-prec | 0.27 | TGTTGGCCTAGTTCTGTGTGGAAGACTAGTGATTTTGTTG |
| 2637 | mir-093-prec-7.1 = 093-1 | 0.25 | CCAAAGTGCTGTTCGTGCAGGTAGTGTGATTACCCAACCT |
| 2638 | mir-106-prec-X | 0.26 | CCTTGGCCATGTAAAAGTGCTTACAGTGCAGGTAGCTTTT |
| 2639 | Hcd794 right | 0.27 | GGCCACCACAGACACCAACAAGTTCAGTCCGTTTCTGCAG |
| 2640 | mir-020-prec | 0.26 | TAAAGTGCTTATAGTGCAGGTAGTGTTTAGTTATCTACTG |
| 2641 | mir-4323p | 0.26 | CCTTACGTGGGCCACTGGATGGCTCCTCCATGTCTTGGAG |

TABLE 100
Radiation microRNA biomarkers.

| | | | |
|---|---|---|---|
| SEQ | | | |
| ID | | | |
| NO | Medianprobe | Corr | Sequence |

| | | | |
|---|---|---|---|
| 2642 | mir-136-precNo2 | 0.3 | TGAGCCCTCGGAGGACTCCATTTGTTTTGATGATGGATTC |
| 2643 | Hcd570 right | 0.26 | GCCCAACAGAACAACTTGTTTCTCCAGAGCCTGAGGTTTA |
| 2644 | Hcd873 left | 0.26 | TCTTCTGACAATGAAGGTAGGCGGACAACGAGGAGATTGC |
| 2645 | Hcd282PO right | 0.26 | GAAGACGGACTTGGTTCCGTTTGACCAGCCAGAGCAGGGG |
| 2646 | Hcd799 left | 0.25 | GTCCGGCGCGAGTGGAGCTGTTGTAAAATGGCGGCCGAAG |
| 2647 | Hcd829 right | 0.39 | AAAATGGCGGCGGGAAAAGCGAGCGGCGAGAGCGAGGAGG |
| 2648 | Hcd210_HPR205 right | 0.32 | CGAAACATTCGCGGTGCACTTCTTTTTCAGTATCCTATTC |
| 2649 | mir-219-prec | 0.26 | ATTGTCCAAACGCAATTCTCGAGTCTATGGCTCCGGCCGA |
| 2650 | mir-202* | 0.31 | CCGCCCGCCGTTCCTTTTTCCTATGCATATACTTCTTTGA |
| 2651 | mir-429No2 | 0.42 | CACCGCCGGCCGATGGGCGTCTTACCAGACATGGTTAGAC |
| 2652 | Hcd693 right | 0.32 | AGGCTTTGTGCGCGCATTAAAGCTCGCCGGACCCCCGACC |
| 2653 | mir-022-prec | 0.34 | TGTCCTGACCCAGCTAAAGCTGCCAGTTGAAGAACTGTTG |
| 2654 | NPR88 right | 0.32 | CTTACCCTGGTGCGTGGGGCCGCAGGGCTAACACCAAAAA |
| 2655 | mir-198-prec | 0.39 | TCATTGGTCCAGAGGGGAGATAGGTTCCTGTGATTTTTCC |
| 2656 | mir-199b-precNo1 | 0.29 | GTCTGCACATTGGTTAGGCTGGGCTGGGTTAGACCCTCGG |
| 2657 | Hcd145 left | 0.26 | AAAAATCCCAGCGGCCACCTTTCCTCCCTGCCCCATTGGG |
| 2658 | mir-124a-2-prec | 0.34 | TTAAGGCACGCGGTGAATGCCAAGAGCGGAGCCTACGGCT |
| 2659 | mir-138-2-prec | 0.39 | AGCTGGTGTTGTGAATCAGGCCGACGAGCAGCGCATCCTC |
| 2660 | Hcd960 left | 0.29 | CTCAGTCTGCGGGCCCCGAGGAGGGTTGTGGGCCCTTTTT |
| 2661 | Hcd869 left | 0.31 | CGAGAGGCACTTTGTACTTCTGCCAGGAGACCATATGATA |
| 2662 | Hcd384 left | 0.41 | TTACCCAGCCGGGCCGCCAACACCAGATCCTTCTCCTTCT |
| 2663 | mir-027b-prec | 0.31 | CCGCTTTGTTCACAGTGGCTAAGTTCTGCACCTGAAGAGA |
| 2664 | Hcd444 right | 0.31 | GTATATGTGTGTGTGTGTGTGTGTGTGTGTGTGTGTGTGT |
| 2665 | mir-194-2No1 | 0.3 | TGGTTCCCGCCCCCTGTAACAGCAACTCCATGTGGAAGTG |
| 2666 | mir-197-prec | 0.44 | TAAGAGCTCTTCACCCTTCACCACCTTCTCCACCCAGCAT |
| 2667 | Hcd913 right | 0.39 | CAAACATCATGTGACGTCTGTGGAGCGGCGGCGGCGGCGG |
| 2668 | HPR163 left | 0.39 | GCTGCCCCCTCCCTTAGCAACGTGGCCCCGGCGTTCCAAA |
| 2669 | mir-138-1-prec | 0.25 | AGCTGGTGTTGTGAATCAGGCCGTTGCCAATCAGAGAACG |
| 2670 | mir-010a-precNo1 | 0.25 | GTCTGTCTTCTGTATATACCCTGTAGATCCGAATTTGTGT |
| 2671 | mir-023b-prec | 0.34 | AATCACATTGCCAGGGATTACCACGCAACCACGACCTTGG |
| 2672 | mir-193bNo2 | 0.35 | CTGTGGTCTCAGAATCGGGGTTTTGAGGGCGAGATGAGTT |
| 2673 | Hcd654 left | 0.43 | AACGAGTAAAAGGCGTACATGGGAGCGCGGGGCGGCAGAG |
| 2674 | Hcd542 left | 0.26 | ATCTCAGTAGCCAATATTTTTCTCTGCTGGTATCAAATGA |
| 2675 | mir-199a-2-prec | 0.28 | TCGCCCCAGTGTTCAGACTACCTGTTCAGGACAATGCCGT |
| 2676 | mir-214-prec | 0.43 | TGTACAGCAGGCACAGACAGGCAGTCACATGACAACCCAG |
| 2677 | Hcd608 right | 0.31 | CTTGTGTTTTCACAGCAGCCACAGGCCCTACATCCTTCCT |
| 2678 | Hcd684 right | 0.28 | AGAAGGCGCTCCCTGCTAGCCCGGCTCTGTTCTAATTATA |
| 2679 | mir-145-prec | 0.4 | CCTCACGGTCCAGTTTTCCCAGGAATCCCTTAGATGCTAA |
| 2680 | mir-023a-prec | 0.37 | TCCTGTCACAAATCACATTGCCAGGGATTTCCAACCGACC |
| 2681 | mir-024-2-prec | 0.32 | AGTTGGTTTGTGTACACTGGCTCAGTTCAGCAGGAACAGG |
| 2682 | mir-199a-1-prec | 0.29 | GCCAACCCAGTGTTCAGACTACCTGTTCAGGAGGCTCTCA |

TABLE 101
5-Aza-2′-deoxycytidine (decitabine) microRNA biomarkers.

| | | | |
|---|---|---|---|
| SEQ | | | |
| ID | | | |
| NO | Medianprobe | Corr | Sequence |

| | | | |
|---|---|---|---|
| 2683 | mir-096-prec-7No1 | 0.36 | CTCCGCTCTGAGCAATCATGTGCAGTGCCAATATGGGAAA |
| 2684 | Hcd605 right | 0.25 | GGTTAAGACTCTAACAAACGAGTTGTGAATTGTAGCAATG |
| 2685 | mir-20bNo1 | 0.3 | AGTACCAAAGTGCTCATAGTGCAGGTAGTTTTGGCATGAC |
| 2686 | miR-373*No1 | 0.26 | GGGATACTCAAAATGGGGGCGCTTTCCTTTTTGTCTGTAC |
| 2687 | HUMTRAB | 0.3 | ATGGTAGAGCGCTCGCTTTGCTTGCGAGAGGTAGCGGGAT |
| 2688 | mir-019b-1-prec | 0.25 | TTCTGCTGTGCAAATCCATGCAAAACTGACTGTGGTAGTG |
| 2689 | HPR163 left | 0.31 | GCTGCCCCCTCCCTTAGCAACGTGGCCCCGGCGTTCCAAA |
| 2690 | mir-371No1 | 0.25 | ACTTTCTGCTCTCTGGTGAAAGTGCCGCCATCTTTTGAGT |
| 2691 | mir-025-prec | 0.29 | ACGCTGCCCTGGGCATTGCACTTGTCTCGGTCTGACAGTG |
| 2692 | mir-18bNo2 | 0.27 | AGCAGCTTAGAATCTACTGCCCTAAATGCCCCTTCTGGCA |
| 2693 | mir-093-prec-7.1 = 093-1 | 0.28 | CCAAAGTGCTGTTCGTGCAGGTAGTGTGATTACCCAACCT |
| 2694 | mir-106-prec-X | 0.29 | CCTTGGCCATGTAAAAGTGCTTACAGTGCAGGTAGCTTTT |
| 2695 | mir-142-prec | 0.29 | CCCATAAAGTAGAAAGCACTACTAACAGCACTGGAGGGTG |
| 2696 | mir-020-prec | 0.29 | TAAAGTGCTTATAGTGCAGGTAGTGTTTAGTTATCTACTG |

TABLE 102
Idarubicin microRNA biomarkers.

| | | | |
|---|---|---|---|
| SEQ | | | |
| ID | | | |
| NO | Medianprobe | Corr | Sequence |

| | | | |
|---|---|---|---|
| 2697 | HUMTRF | 0.33 | GATCTAAAGGTCCCTGGTTCGATCCCGGGTTTCGGCACCA |
| 2698 | mir-483No1 | 0.3 | ATCACGCCTCCTCACTCCTCTCCTCCCGTCTTCTCCTCTC |
| 2699 | MPR74 left | 0.27 | CAAAGGTCACAATTAACATTCATTGTTGTCGGTGGGTTGT |
| 2700 | mir-122a-prec | 0.27 | CCTTAGCAGAGCTGTGGAGTGTGACAATGGTGTTTGTGTC |
| 2701 | ath-MIR180aNo2 | 0.29 | TGAGAATCTTGATGATGCTGCATCGGCAATCAACGACTAT |
| 2702 | mir-128b-precNo1 | 0.26 | TCACAGTGAACCGGTCTCTTTCCCTACTGTGTCACACTCC |
| 2703 | Hcd923 left | 0.25 | TGGGAACCTTGTTAAAATGCAGATTCTGATTCTCAGGTCT |
| 2704 | mir-106-prec-X | 0.25 | CCTTGGCCATGTAAAAGTGCTTACAGTGCAGGTAGCTTTT |
| 2705 | mir-342No1 | 0.36 | GTCTCACACAGAAATCGCACCCGTCACCTTGGCCTACTTA |
| 2706 | mir-142-prec | 0.34 | CCCATAAAGTAGAAAGCACTACTAACAGCACTGGAGGGTG |
| 2707 | HPR169 right | 0.25 | GTTTCTTTCTCACGGTAACTGGCAGCCTCGTTGTGGGCTG |
| 2708 | mir-223-prec | 0.36 | GAGTGTCAGTTTGTCAAATACCCCAAGTGCGGCACATGCT |
| 2709 | Hcd754 left | 0.26 | TCCTCCTCCTCCTTTTCGTTCCGGCTCCCTGGCTGGCTCC |
| 2710 | mir-020-prec | 0.29 | TAAAGTGCTTATAGTGCAGGTAGTGTTTAGTTATCTACTG |

TABLE 103
Melphalan microRNA biomarkers.

| | | | |
|---|---|---|---|
| SEQ | | | |
| ID | | | |
| NO | Medianprobe | Corr | Sequence |

| | | | |
|---|---|---|---|
| 2711 | mir-124a-3-prec | 0.32 | TTAAGGCACGCGGTGAATGCCAAGAGAGGCGCCTCCGCCG |
| 2712 | mir-181a-precNo1 | 0.28 | TCAGAGGACTCCAAGGAACATTCAACGCTGTCGGTGAGTT |
| 2713 | Hcd773 left | 0.26 | CTTCCTCCCTGGGCATCTCTAGCACAGGGGATCCCCAAAC |
| 2714 | Hcd683 left | 0.25 | CTATGACAGAAGGTACTCTGTGGGAGGGAGGAGATAATAG |
| 2715 | Hcd796 left | 0.29 | GGTGGGATTACCCGGCTGCCGCTGTCGCCTGGATGGTCTC |
| 2716 | HUMTRF | 0.44 | GATCTAAAGGTCCCTGGTTCGATCCCGGGTTTCGGCACCA |
| 2717 | HUMTRS | 0.27 | TCTAGCGACAGAGTGGTTCAATTCCACCTTTCGGGCGCCA |
| 2718 | mir-181b-2No1 | 0.25 | CTGATGGCTGCACTCAACATTCATTGCTGTCGGTGGGTTT |
| 2719 | Hcd294 left | 0.26 | TTATCATAAAATAATCACAGCCCTCAGGTGCTGTGAGGCA |
| 2720 | mir-20bNo1 | 0.27 | AGTACCAAAGTGCTCATAGTGCAGGTAGTTTTGGCATGAC |
| 2721 | mir-181dNo1 | 0.27 | GAGGTCACAATCAACATTCATTGTTGTCGGTGGGTTGTGA |
| 2722 | mir-213-precNo1 | 0.4 | AACATTCATTGCTGTCGGTGGGTTGAACTGTGTGGACAAG |
| 2723 | Hcd148_HPR225left | 0.29 | AATTAATGACCAAAATGTCAGATGTGTCCACAGCTAATTA |
| 2724 | mir-515-15p | 0.34 | GATCTCATGCAGTCATTCTCCAAAAGAAAGCACTTTCTGT |
| 2725 | mir-181b-precNo1 | 0.43 | TGAGGTTGCTTCAGTGAACATTCAACGCTGTCGGTGAGTT |
| 2726 | Hcd783 left | 0.26 | CAGGCTCACACCTCCCTCCCCCAACTCTCTGGAATGTATA |
| 2727 | HUMTRAB | 0.29 | ATGGTAGAGCGCTCGCTTTGCTTGCGAGAGGTAGCGGGAT |
| 2728 | HUMTRN | 0.27 | CAATCGGTTAGCGCGTTCGGCTGTTAACCGAAAGGTTGGT |
| 2729 | mir-181b-1No1 | 0.31 | TTTAAAAGGTCACAATCAACATTCATTGCTGTCGGTGGGT |
| 2730 | mir-124a-1-prec1 | 0.31 | ATACAATTAAGGCACGCGGTGAATGCCAAGAATGGGGCTG |
| 2731 | mir-367No1 | 0.26 | TCTGTTGAATATAAATTGGAATTGCACTTTAGCAATGGTG |
| 2732 | mir-128b-precNo1 | 0.38 | TCACAGTGAACCGGTCTCTTTCCCTACTGTGTCACACTCC |
| 2733 | Hcd43 8right | 0.25 | GTGTTTATTTGAATCTCACATCGCTCATAAGAATACACGC |
| 2734 | mir-025-prec | 0.3 | ACGCTGCCCTGGGCATTGCACTTGTCTCGGTCTGACAGTG |
| 2735 | mir-216-precNo1 | 0.35 | CTGGGATTATGCTAAACAGAGCAATTTCCTAGCCCTCACG |
| 2736 | Hcd731 left | 0.26 | AATTGTGACAACTGAGTGGGAGGTTTGTGTGATGATTATC |
| 2737 | mir-093-prec-7.1 = 093-1 | 0.25 | CCAAAGTGCTGTTCGTGCAGGTAGTGTGATTACCCAACCT |
| 2738 | mir-106-prec-X | 0.27 | CCTTGGCCATGTAAAAGTGCTTACAGTGCAGGTAGCTTTT |
| 2739 | mir-342No1 | 0.36 | GTCTCACACAGAAATCGCACCCGTCACCTTGGCCTACTTA |
| 2740 | mir-142-prec | 0.53 | CCCATAAAGTAGAAAGCACTACTAACAGCACTGGAGGGTG |
| 2741 | HSHELA01 | 0.32 | GGCCGCAGCAACCTCGGTTCGTATCCGAGTCACGGCACCA |
| 2742 | HUMTRV1A | 0.25 | ACGCGAAAGGTCCCCGGTTCGAAACCGGGCGGAAACACCA |
| 2743 | mir-223-prec | 0.46 | GAGTGTCAGTTTGTCAAATACCCCAAGTGCGGCACATGCT |
| 2744 | Hcd754 left | 0.45 | TCCTCCTCCTCCTTTTCGTTCCGGCTCCCTGGCTGGCTCC |
| 2745 | mir-020-prec | 0.3 | TAAAGTGCTTATAGTGCAGGTAGTGTTTAGTTATCTACTG |

TABLE 104
IL4-PR3B fusion protein microRNA biomarkers.

| SEQ | | | |
|---|---|---|---|
| ID | | | |
| NO | Medianprobe | Corr | Sequence |
| 2746 | Hcd829 right | 0.28 | AAAATGGCGGCGGGAAAAGCGAGCGGCGAGAGCGAGGAGG |
| 2747 | mir-197-prec | 0.28 | TAAGAGCTCTTCACCCTTCACCACCTTCTCCACCCAGCAT |
| 2748 | HPR163 left | 0.28 | GCTGCCCCCTCCCTTAGCAACGTGGCCCCGGCGTTCCAAA |
| 2749 | mir-150-prec | 0.47 | CTCCCCATGGCCCTGTCTCCCAACCCTTGTACCAGTGCTG |

TABLE 105
Valproic acid (VPA) microRNA biomarkers.

| | | | |
|---|---|---|---|
| SEQ | | | |
| ID | | | |
| NO | Medianprobe | Corr | Sequence |

| | | | |
|---|---|---|---|
| 2750 | mir-034precNo1 | 0.26 | GAGTGTTTCTTTGGCAGTGTCTTAGCTGGTTGTTGTGAGC |
| 2751 | Hcd255 left | 0.28 | CTAGCTCCGTTCGTGATCCGGGAGCCTGGTGCCAGCGAGA |
| 2752 | Hcd712 right | 0.27 | GAAGATCGGTTGTCATCTGGTCTGGTCAGCCCGGCCCCGA |
| 2753 | Hcd965 left | 0.26 | TGTTAAGTGGAAAAGCCTCCAGGAACGTGGCAGAAAAAGG |
| 2754 | Hcd891 right | 0.29 | GCAACGGCCTGATTCACAACACCAGCTGCCCCACCACACC |
| 2755 | Hcd210_HPR205 right | 0.31 | CGAAACATTCGCGGTGCACTTCTTTTTCAGTATCCTATTC |
| 2756 | mir-429No2 | 0.33 | CACCGCCGGCCGATGGGCGTCTTACCAGACATGGTTAGAC |
| 2757 | Hcd753 left | 0.27 | GACCTGATTCCCATCTTTGTATTTGGCGACCACCCGACTG |
| 2758 | Hcd693 right | 0.38 | AGGCTTTGTGCGCGCATTAAAGCTCGCCGGACCCCCGACC |
| 2759 | MPR203 left | 0.25 | CTATATTGGACCGCAGCGCTGAGAGCTTTTGTGTTTAATG |
| 2760 | Hcd704 left | 0.4 | TCTGTATTTAATTTGGCTCAGCCGGGAAGATTTTTGGCTC |
| 2761 | Hcd863PO right | 0.3 | TTGCAGAGCCTAAGACACAGGCCCAGAGAGGCAGTGATCG |
| 2762 | mir-122a-prec | 0.29 | CCTTAGCAGAGCTGTGGAGTGTGACAATGGTGTTTGTGTC |
| 2763 | Hcd760 left | 0.35 | TGTGGTCACGTTTCTCCCTCTCTGCTGGCCCCCATCTGTC |
| 2764 | Hcd338 left | 0.35 | CTTCTCCTCCTGTTCGCCGCAGGCGCCCGTCCCAGTAGTC |
| 2765 | HPR213 right | 0.33 | AACAACTTTGTGCTGGTGCCGGGGAAGTTTGTGTCTCCAA |
| 2766 | Hcd852 right | 0.26 | AAAAGTAAACAACAATTTGCCGCTGCCAGCCTCCCATTAG |
| 2767 | Hcd366 left | 0.28 | ATACTAGATTAAATTTCAGCCCCGGGCCAATCTGTCAAAG |
| 2768 | MPR103 right | 0.27 | GAGGTGTTTGTGCTCCACTCGGCTCCCTTGGTTACATAAC |
| 2769 | Hcd669 right | 0.27 | ATGTTTAACAGTCCAGGTTTTGTAGAATATGTGGTGGACC |
| 2770 | mir-188-prec | 0.27 | TCACATCCCTTGCATGGTGGAGGGTGAGCTTTCTGAAAAC |

TABLE 106
All-trans retinoic acid (ATRA) microRNA biomarkers.

| | | | |
|---|---|---|---|
| SEQ | | | |
| ID | | | |
| NO | Medianprobe | Corr | Sequence |

| | | | |
|---|---|---|---|
| 2771 | Hcd257 left | 0.42 | CTTCTTGTATAAGCACTGTGCTAAAATTGCAGACACTAGG |
| 2772 | mir-148-prec | 0.45 | TGAGTATGATAGAAGTCAGTGCACTACAGAACTTTGTCTC |
| 2773 | Hcd512 left | 0.28 | CTGCGCTCTCGGAAATGACTCGCTCCAATCCCGCTTCGCG |
| 2774 | HPR227 right | 0.25 | CAGTGCAATGATATTGTCAAAGCATCTGGGACCAGCCTTG |
| 2775 | Hcd421 right | 0.37 | AGTAAACAATGTCGGCTTTCCGCCTCCTCCCCTGCCATCC |
| 2776 | MPR203 left | 0.39 | CTATATTGGACCGCAGCGCTGAGAGCTTTTGTGTTTAATG |
| 2777 | mir-017-precNo1 | 0.26 | GCATCTACTGCAGTGAAGGCACTTGTAGCATTATGGTGAC |
| 2778 | mir-219-2No1 | 0.26 | CTCAGGGGCTTCGCCACTGATTGTCCAAACGCAATTCTTG |
| 2779 | mir-328No1 | 0.3 | GAAAGTGCATACAGCCCCTGGCCCTCTCTGCCCTTCCGTC |
| 2780 | Hcd783 left | 0.31 | CAGGCTCACACCTCCCTCCCCCAACTCTCTGGAATGTATA |
| 2781 | Hcd181 left | 0.32 | TTGGCGTCCTTGTCTCTCTCTCCCCTGCCCAGTGGCCTCC |
| 2782 | HPR213 right | 0.3 | AACAACTTTGTGCTGGTGCCGGGGAAGTTTGTGTCTCCAA |
| 2783 | mir-191-prec | 0.31 | CAACGGAATCCCAAAAGCAGCTGTTGTCTCCAGAGCATTC |
| 2784 | mir-375 | 0.31 | TTTTGTTCGTTCGGCTCGCGTGAGGCAGGGGCGGCCTCTC |
| 2785 | mir-212-precNo2 | 0.26 | CGGACAGCGCGCCGGCACCTTGGCTCTAGACTGCTTACTG |
| 2786 | Hcd913 right | 0.34 | CAAACATCATGTGACGTCTGTGGAGCGGCGGCGGCGGCGG |
| 2787 | Hcd716 right | 0.48 | CAATAAATGTGCCTATAAAGGCGCCGGCTCCGGGGCGCGG |
| 2788 | MPR207 right | 0.3 | AACAACTTTGTGCTGGTGCCGGGGAAGTTTGTGTCTCCTA |
| 2789 | HPR206 left | 0.26 | CTATATTGGACCGCAGCGCTGAGAGCTTTTGTGTTTAATG |
| 2790 | mir-016b-chr3 | 0.29 | GTTCCACTCTAGCAGCACGTAAATATTGGCGTAGTGAAAT |
| 2791 | Hcd654 left | 0.34 | AACGAGTAAAAGGCGTACATGGGAGCGCGGGGCGGCAGAG |
| 2792 | mir-195-prec | 0.3 | TCTAGCAGCACAGAAATATTGGCACAGGGAAGCGAGTCTG |
| 2793 | Hcd425 left | 0.25 | GGTTCTACTCTCTTACCCCTCCCCCACGTGGTTGTTGCTG |
| 2794 | mir-148aNo1 | 0.35 | TGAGTATGATAGAAGTCAGTGCACTACAGAACTTTGTCTC |
| 2795 | mir-142-prec | 0.36 | CCCATAAAGTAGAAAGCACTACTAACAGCACTGGAGGGTG |
| 2796 | mir-016a-chr13 | 0.25 | CAATGTCAGCAGTGCCTTAGCAGCACGTAAATATTGGCGT |

TABLE 107
Cytoxan microRNA biomarkers.

| SEQ | | | |
|---|---|---|---|
| ID | | | |
| NO | Medianprobe | Corr | Sequence |
| 2797 | Hcd99 right | 0.25 | CAATCCTGGCTGCAGGCATATTTGCATATTGGATGCTGTG |
| 2798 | mir-520c/526a | 0.32 | TCTCAGGCTGTCGTCCTCTAGAGGGAAGCACTTTCTGTTG |
| 2799 | mir-191-prec | 0.32 | CAACGGAATCCCAAAAGCAGCTGTTGTCTCCAGAGCATTC |
| 2800 | mir-205-prec | 0.35 | TCCTTCATTCCACCGGAGTCTGTCTCATACCCAACCAGAT |
| 2801 | mir-375 | 0.33 | TTTTGTTCGTTCGGCTCGCGTGAGGCAGGGGCGGCCTCTC |
| 2802 | mir-423No1 | 0.29 | CAAAAGCTCGGTCTGAGGCCCCTCAGTCTTGCTTCCTAAC |
| 2803 | mir-449No1 | 0.39 | TGTGATGAGCTGGCAGTGTATTGTTAGCTGGTTGAATATG |
| 2804 | mir-196-2-precNo2 | 0.26 | GCTGATCTGTGGCTTAGGTAGTTTCATGTTGTTGGGATTG |

TABLE 108
Topotecan (Hycamtin) microRNA biomarkers.

| SEQ | | | |
|---|---|---|---|
| ID | | | |
| NO | Medianprobe | Corr | Sequence |
| 2805 | HUMTRF | 0.26 | GATCTAAAGGTCCCTGGTTCGATCCCGGGTTTCGGCACCA |
| 2806 | MPR74 left | 0.29 | CAAAGGTCACAATTAACATTCATTGTTGTCGGTGGGTTGT |
| 2807 | mir-213-precNo1 | 0.28 | AACATTCATTGCTGTCGGTGGGTTGAACTGTGTGGACAAG |
| 2808 | mir-155-prec | 0.31 | TTAATGCTAATCGTGATAGGGGTTTTTGCCTCCAACTGAC |
| 2809 | mir-181b-precNo1 | 0.31 | TGAGGTTGCTTCAGTGAACATTCAACGCTGTCGGTGAGTT |
| 2810 | mir-342No1 | 0.33 | GTCTCACACAGAAATCGCACCCGTCACCTTGGCCTACTTA |
| 2811 | mir-4323p | 0.28 | CCTTACGTGGGCCACTGGATGGCTCCTCCATGTCTTGGAG |

TABLE 109

Suberoylanilide hydroxamic acid (SAHA, vorinostat, Zolinza)
microRNA biomarkers.

| | | | |
|---|---|---|---|
| SEQ | | | |
| ID | | | |
| NO | Medianprobe | Corr | Sequence |

| | | | |
|---|---|---|---|
| 2812 | mir-092-prec-X = 092-2 | 0.38 | GTTCTATATAAAGTATTGCACTTGTCCCGGCCTGTGGAAG |
| 2813 | mir-123-precNo1 | 0.31 | GACGGGACATTATTACTTTTGGTACGCGCTGTGACACTTC |
| 2814 | mir-514-1No2 | 0.29 | TGTCTGTGGTACCCTACTCTGGAGAGTGACAATCATGTAT |
| 2815 | mir-101-prec-9 | 0.25 | GCTGTATATCTGAAAGGTACAGTACTGTGATAACTGAAGA |
| 2816 | mir-148-prec | 0.36 | TGAGTATGATAGAAGTCAGTGCACTACAGAACTTTGTCTC |
| 2817 | mir-106aNo1 | 0.34 | CCTTGGCCATGTAAAAGTGCTTACAGTGCAGGTAGCTTTT |
| 2818 | mir-20bNo1 | 0.41 | AGTACCAAAGTGCTCATAGTGCAGGTAGTTTTGGCATGAC |
| 2819 | Hcd781 right | 0.32 | AGTTTCTTTAATTAATGAAGTTTTTGGGTCTGCTCCACTT |
| 2820 | mir-017-precNo2 | 0.29 | GTCAGAATAATGTCAAAGTGCTTACAGTGCAGGTAGTGAT |
| 2821 | mir-019b-2-prec | 0.42 | GTGGCTGTGCAAATCCATGCAAAACTGATTGTGATAATGT |
| 2822 | mir-033-prec | 0.27 | GTGGTGCATTGTAGTTGCATTGCATGTTCTGGTGGTACCC |
| 2823 | mir-092prec-13 = 092-1No2 | 0.28 | TCTGTATGGTATTGCACTTGTCCCGGCCTGTTGAGTTTGG |
| 2824 | mir-107No1 | 0.29 | GGCATGGAGTTCAAGCAGCATTGTACAGGGCTATCAAAGC |
| 2825 | mir-103-prec-5 = 103-1 | 0.32 | TATGGATCAAGCAGCATTGTACAGGGCTATGAAGGCATTG |
| 2826 | MPR216 left | 0.29 | GATCCTAGTAGTGCCAAAGTGCTCATAGTGCAGGTAGTTT |
| 2827 | mir-29b-2 = 102prec7.1 = 7.2 | 0.27 | AGTGATTGTCTAGCACCATTTGAAATCAGTGTTCTTGGGG |
| 2828 | mir-019b-1-prec | 0.4 | TTCTGCTGTGCAAATCCATGCAAAACTGACTGTGGTAGTG |
| 2829 | mir-107-prec-10 | 0.3 | GGCATGGAGTTCAAGCAGCATTGTACAGGGCTATCAAAGC |
| 2830 | mir-135-2-prec | 0.37 | CACTCTAGTGCTTTATGGCTTTTTATTCCTATGTGATAGT |
| 2831 | Hcd581 right | 0.28 | AGGAGATATGCCAAGATATATTCACAGCTTTATATACACA |
| 2832 | mir-103-2-prec | 0.29 | GTAGCATTCAGGTCAAGCAACATTGTACAGGGCTATGAAA |
| 2833 | Hcd230 left | 0.27 | CATTCTCTACAAGCATATGGCCTTGGGACATTAAGATGGC |
| 2834 | mir-025-prec | 0.4 | ACGCTGCCCTGGGCATTGCACTTGTCTCGGTCTGACAGTG |
| 2835 | mir-208-prec | 0.31 | ACCTGATGCTCACGTATAAGACGAGCAAAAAGCTTGTTGG |
| 2836 | mir-18bNo2 | 0.31 | AGCAGCTTAGAATCTACTGCCCTAAATGCCCCTTCTGGCA |
| 2837 | mir-093-prec-7.1 = 093-1 | 0.39 | CCAAAGTGCTGTTCGTGCAGGTAGTGTGATTACCCAACCT |
| 2838 | mir-106-prec-X | 0.48 | CCTTGGCCATGTAAAAGTGCTTACAGTGCAGGTAGCTTTT |
| 2839 | mir-142-prec | 0.37 | CCCATAAAGTAGAAAGCACTACTAACAGCACTGGAGGGTG |
| 2840 | HPR169 right | 0.28 | GTTTCTTTCTCACGGTAACTGGCAGCCTCGTTGTGGGCTG |
| 2841 | mir-018-prec | 0.44 | TAAGGTGCATCTAGTGCAGATAGTGAAGTAGATTAGCATC |
| 2842 | mir-020-prec | 0.48 | TAAAGTGCTTATAGTGCAGGTAGTGTTTAGTTATCTACTG |

TABLE 110
Depsipeptide (FR901228) microRNA biomarkers.

| SEQ | | | |
|---|---|---|---|
| ID | | | |
| NO | Medianprobe | Corr | Sequence |
| 2843 | Hcd415 right | 0.27 | GATGTTTGGGAAACAATGGGAGTGAGAGAATGGGAGAGCT |
| 2844 | mir-147-prec | 0.27 | GACTATGGAAGCCAGTGTGTGGAAATGCTTCTGCTAGATT |
| 2845 | mir-033b-prec | 0.34 | GTGCATTGCTGTTGCATTGCACGTGTGTGAGGCGGGTGCA |
| 2846 | Hcd778 right | 0.34 | CAGAGGGGAGGCCCAGAGGAGAGGGAAGCTTGGGCAAAGG |
| 2847 | mir-127-prec | 0.25 | TCGGATCCGTCTGAGCTTGGCTGGTCGGAAGTCTCATCAT |
| 2848 | mir-324No1 | 0.28 | TGGAGACCCACTGCCCCAGGTGCTGCTGGGGGTTGTAGTC |
| 2849 | Hcd794 right | 0.35 | GGCCACCACAGACACCAACAAGTTCAGTCCGTTTCTGCAG |
| 2850 | Hcd634 left | 0.27 | CTGCTCCGCTCAGAGCCTTTTCCTCTCCACTTCCTGTTCA |

TABLE 111
Bortezomib microRNA biomarkers.

| | | | |
|---|---|---|---|
| SEQ | | | |
| ID | | | |
| NO | Medianprobe | Corr | Sequence |

| | | | |
|---|---|---|---|
| 2851 | MPR121 left | 0.31 | CACCTGGCTCTGAGAACTGAATTCCATAGGCTGTGAGCTC |
| 2852 | Hcd115 left | 0.27 | CTCTGTGGCCATTTCGGTTTTTCCAGTCCGATGCCCCTGA |
| 2853 | Hcd693 right | 0.28 | AGGCTTTGTGCGCGCATTAAAGCTCGCCGGACCCCCGACC |
| 2854 | Hcd704 left | 0.25 | TCTGTATTTAATTTGGCTCAGCCGGGAAGATTTTTGGCTC |
| 2855 | HPR100 right | 0.28 | GGTGTTTGTGCTCCACTCAGCTCCCTTGGTTACATAACAG |
| 2856 | Hcd760 left | 0.26 | TGTGGTCACGTTTCTCCCTCTCTGCTGGCCCCCATCTGTC |
| 2857 | mir-147-prec | 0.3 | GACTATGGAAGCCAGTGTGTGGAAATGCTTCTGCTAGATT |
| 2858 | mir-033b-prec | 0.29 | GTGCATTGCTGTTGCATTGCACGTGTGTGAGGCGGGTGCA |
| 2859 | mir-146-prec | 0.33 | TGAGAACTGAATTCCATGGGTTGTGTCAGTGTCAGACCTC |
| 2860 | Hcd142 right | 0.3 | TAAATGTGTAATTTCTCCCTTGACGGCCCCCGGCCGCTGG |
| 2861 | mir-501No2 | 0.33 | ATGCAATGCACCCGGGCAAGGATTCTGAGAGGGTGAGCCC |
| 2862 | Hcd716 right | 0.26 | CAATAAATGTGCCTATAAAGGCGCCGGCTCCGGGGCGCGG |
| 2863 | MPR207 right | 0.27 | AACAACTTTGTGCTGGTGCCGGGGAAGTTTGTGTCTCCTA |
| 2864 | Hcd777 left | 0.26 | CAGGTGGGTGCTGAGGCCGCGTTGTTGCTTGAAGCTAGCC |
| 2865 | mir-204-precNo2 | 0.27 | AGGCTGGGAAGGCAAAGGGACGTTCAATTGTCATCACTGG |
| 2866 | mir-146bNo1 | 0.26 | CACCTGGCACTGAGAACTGAATTCCATAGGCTGTGAGCTC |
| 2867 | Hcd511 right | 0.29 | TACCTCAGAAGCCTCACTCAACCCTCTCCCGCTGAGTCTC |
| 2868 | Hcd397 left | 0.28 | GTGTGTATACTTATGTGTGTGTATGTGTGAGTGTGAATAT |
| 2869 | MPR130 right | 0.33 | CAATCACAGATAGCACCCCTCACCTTGAGCCCATTTTCAC |
| 2870 | Hcd782 left | 0.28 | GGAGCCCTGTCTGCAAAGAGTGGTGCGTGTGCGTGTGTGA |
| 2871 | mir-324No2 | 0.28 | CTGACTATGCCTCCCCGCATCCCCTAGGGCATTGGTGTAA |
| 2872 | Hcd794 right | 0.34 | GGCCACCACAGACACCAACAAGTTCAGTCCGTTTCTGCAG |
| 2873 | Hcd739 right | 0.29 | TATTAGCTGAGGGAGGGCTGGAGGCGGCTGCATTCCGACT |

TABLE 112
Leukeran microRNA biomarkers.

| | | | |
|---|---|---|---|
| SEQ | | | |
| ID | | | |
| NO | Medianprobe | Corr | Sequence |

| | | | |
|---|---|---|---|
| 2874 | mir-092prec-X = 092-2 | 0.39 | GTTCTATATAAAGTATTGCACTTGTCCCGGCCTGTGGAAG |
| 2875 | mir-096-prec-7No1 | 0.26 | CTCCGCTCTGAGCAATCATGTGCAGTGCCAATATGGGAAA |
| 2876 | mir-123-precNo2 | 0.32 | TGTGACACTTCAAACTCGTACCGTGAGTAATAATGCGCCG |
| 2877 | MPR249 left | 0.26 | TCGGTTTGGTTCAGCTGGTATGCTTTCCAGTATCTCATTC |
| 2878 | HPR232 right | 0.28 | TGAATTATTGCACAATAAATTCATGCCCTGTTGTGTCTTA |
| 2879 | mir-101-prec-9 | 0.4 | GCTGTATATCTGAAAGGTACAGTACTGTGATAACTGAAGA |
| 2880 | mir-106aNo1 | 0.31 | CCTTGGCCATGTAAAAGTGCTTACAGTGCAGGTAGCTTTT |
| 2881 | mir-20bNo1 | 0.38 | AGTACCAAAGTGCTCATAGTGCAGGTAGTTTTGGCATGAC |
| 2882 | Hcd861 right | 0.25 | AAGGTCTGGATTGATCGTACTGCTTTCTGAAAGGTAAAAA |
| 2883 | mir-017-precNo2 | 0.26 | GTCAGAATAATGTCAAAGTGCTTACAGTGCAGGTAGTGAT |
| 2884 | mir-019b-2-prec | 0.33 | GTGGCTGTGCAAATCCATGCAAAACTGATTGTGATAATGT |
| 2885 | mir-033-prec | 0.3 | GTGGTGCATTGTAGTTGCATTGCATGTTCTGGTGGTACCC |
| 2886 | Hcd102 left | 0.26 | ACTGGAATTATGTTTTATCTTAAGTCCACACTGGATCCTC |
| 2887 | MFR216 left | 0.32 | GATCCTAGTAGTGCCAAAGTGCTCATAGTGCAGGTAGTTT |
| 2888 | Hcd975 left | 0.25 | GGTTTTGTGTTTTTGTAAACAGCAGAAGGTATTAGTCCAT |
| 2889 | mir-019b-1-prec | 0.3 | TTCTGCTGTGCAAATCCATGCAAAACTGACTGTGGTAGTG |
| 2890 | mir-135-2-prec | 0.38 | CACTCTAGTGCTTTATGGCTTTTTATTCCTATGTGATAGT |
| 2891 | Hcd581 right | 0.26 | AGGAGATATGCCAAGATATATTCACAGCTTTATATACACA |
| 2892 | Hcd536_HPR104 right | 0.25 | GCTGCTCTGCTGAGGGGCTGGACTCTGTCCAGAAGCACCA |
| 2893 | mir-128b-precNo2 | 0.25 | GGGGGCCGATACACTGTACGAGAGTGAGTAGCAGGTCTCA |
| 2894 | HSTRNL | 0.37 | TCCGGATGGAGCGTGGGTTCGAATCCCACTTCTGACACCA |
| 2895 | mir-025-prec | 0.47 | ACGCTGCCCTGGGCATTGCACTTCTCTCGGTCTGACAGTG |
| 2896 | mir-18bNo2 | 0.27 | AGCAGCTTAGAATCTACTGCCCTAAATGCCCCTTCTGGCA |
| 2897 | HPR262 left | 0.26 | TCAGTTTGGTTCAGCTGGTATGCTTTCCAGTATCTCATTC |
| 2898 | Hcd923 right | 0.33 | CTGGAGATAATGATTCTGCATTTCTAATTAACTCCCAGGT |
| 2899 | Hcd434 right | 0.3 | CACTTTTTCCTTTGTGGAAATCCTGGGTGACATCACCTCC |
| 2900 | Hcd658 right | 0.28 | GACTGCAGAGCAAAAGACACGATGGGTGTCTATTGTTTTC |
| 2901 | HPR129 left | 0.29 | TTTTCCTGCTTGATTTGCTTAATGGAAGCTGACAGTGAAG |
| 2902 | mir-380-5p | 0.32 | AGGTACCTGAAAAGATGGTTGACCATAGAACATGCCCTAT |
| 2903 | mir-093-prec-7.1 = 093-1 | 0.45 | CCAAAGTGCTGTTCGTGCAGGTAGTGTGATTACCCAACCT |
| 2904 | mir-106-prec-X | 0.5 | CCTTGGCCATGTAAAAGTGCTTACAGTGCAGGTAGCTTTT |
| 2905 | Hcd627 left | 0.31 | GCATTAGGGAGAATAGTTGATGGATTACAAATCTCTGCAT |
| 2906 | mir-142-prec | 0.33 | CCCATAAAGTAGAAAGCACTACTAACAGCACTGGAGGGTG |
| 2907 | mir-018-prec | 0.46 | TAAGGTGCATCTAGTGCAGATAGTGAAGTAGATTAGCATC |
| 2908 | mir-020-prec | 0.5 | TAAAGTGCTTATAGTGCAGGTAGTGTTTAGTTATCTACTG |

TABLE 113
Fludarabine microRNA biomarkers.

| | | | |
|---|---|---|---|
| SEQ | | | |
| ID | | | |
| NO | Medianprobe | Corr | Sequence |

| | | | |
|---|---|---|---|
| 2909 | Hcd773 left | 0.26 | CTTCCTCCCTGGGCATCTCTAGCACAGGGGATCCCCAAAC |
| 2910 | Hcd248 right | 0.33 | CATTATGCAAATGGTATGAGAGGAAAATTAGGCAATAAGG |
| 2911 | mir-181dNo1 | 0.34 | GAGGTCACAATCAACATTCATTGTTGTCGGTGGGTTGTGA |
| 2912 | MPR74 left | 0.3 | CAAAGGTCACAATTAACATTCATTGTTGTCGGTGGGTTGT |
| 2913 | mir-213-precNo1 | 0.37 | AACATTCATTGCTGTCGGTGGGTTGAACTGTGTGGACAAG |
| 2914 | mir-155-prec | 0.32 | TTAATGCTAATCGTGATAGGGGTTTTTGCCTCCAACTGAC |
| 2915 | MPR197 right | 0.29 | TATTTATTACAAGGTCCTTCTTCCCCGTAAAACTTTGTCC |
| 2916 | mir-181b-precNo1 | 0.26 | TGAGGTTGCTTCAGTGAACATTCAACGCTGTCGGTGAGTT |
| 2917 | mir-29b-2 = 102prec7.1 = 7.2 | 0.32 | AGTGATTGTCTAGCACCATTTGAAATCAGTGTTCTTGGGG |
| 2918 | mir-029c-prec | 0.33 | TTTTGTCTAGCACCATTTGAAATCGGTTATGATGTAGGGG |
| 2919 | Hcd318 right | 0.32 | CAAGTGGTTAATTGAGCCCACAAGTGACCTACTCAATCAG |
| 2920 | mir-128b-precNo1 | 0.25 | TCACAGTGAACCGGTCTCTTTCCCTACTGTGTCACACTCC |
| 2921 | mir-130a-precNo2 | 0.27 | TGTCTGCACCTGTCACTAGCAGTGCAATGTTAAAAGGGCA |
| 2922 | mir-140No2 | 0.26 | TTCTACCACAGGGTAGAACCACGGACAGGATACCGGGGCA |
| 2923 | mir-16-2No1 | 0.31 | GTTCCACTCTAGCAGCACGTAAATATTGGCGTAGTGAAAT |
| 2924 | mir-526a-2No1 | 0.26 | GATCTCGTGCTGTGACCCTCTAGAGGGAAGCACTTTCTGT |
| 2925 | mir-016b-chr3 | 0.3 | GTTCCACTCTAGCAGCACGTAAATATTGGCGTAGTGAAAT |
| 2926 | mir-195-prec | 0.34 | TCTAGCAGCACAGAAATATTGGCACAGGGAAGCGAGTCTG |
| 2927 | mir-216-precNo1 | 0.25 | CTGGGATTATGCTAAACAGAGCAATTTCCTAGCCCTCACG |
| 2928 | mir-342No1 | 0.26 | GTCTCACACAGAAATCGCACCCGTCACCTTGGCCTACTTA |
| 2929 | mir-29b-1No1 | 0.34 | AGTGATTGTCTAGCACCATTTGAAATCAGTGTTCTTGGGG |
| 2930 | Hcd627 left | 0.33 | GCATTAGGGAGAATAGTTGATGGATTACAAATCTCTGCAT |
| 2931 | mir-102-prec-1 | 0.33 | TCTTTGTATCTAGCACCATTTGAAATCAGTGTTTTAGGAG |
| 2932 | mir-142-prec | 0.32 | CCCATAAAGTAGAAAGCACTACTAACAGCACTGGAGGGTG |
| 2933 | mir-223-prec | 0.34 | GAGTGTCAGTTTGTCAAATACCCCAAGTGCGGCACATGCT |
| 2934 | let-7f-2-prec2 | 0.26 | TGAGGTAGTAGATTGTATAGTTTTAGGGTCATACCCCATC |
| 2935 | mir-016a-chr13 | 0.36 | CAATGTCAGCAGTGCCTTAGCAGCACGTAAATATTGGCGT |

TABLE 114
Vinblastine microRNA biomarkers.

| SEQ | | | |
|---|---|---|---|
| ID | | | |
| NO | Medianprobe | Corr | Sequence |
| 2936 | Hcd794 right | 0.33 | GGCCACCACAGACACCAACAAGTTCAGTCCGTTTCTGCAG |
| 2937 | Hcd754 left | 0.25 | TCCTCCTCCTCCTTTTCGTTCCGGCTCCCTGGCTGGCTCC |

TABLE 115
Busulfan microRNA biomarkers.

| | | | |
|---|---|---|---|
| SEQ | | | |
| ID | | | |
| NO | Medianprobe | Corr | Sequence |

| | | | |
|---|---|---|---|
| 2938 | mir-096-prec-7No2 | 0.27 | TGGCCGATTTTGGCACTAGCACATTTTTGCTTGTGTCTCT |
| 2939 | mir-124a-3-prec | 0.25 | TTAAGGCACGCGGTGAATGCCAAGAGAGGCGCCTCCGCCG |
| 2940 | mir-101-prec-9 | 0.25 | GCTGTATATCTGAAAGGTACAGTACTGTGATAACTGAAGA |
| 2941 | Hcd712 right | 0.27 | GAAGATCGGTTGTCATCTGGTCTGGTCAGCCCGGCCCCGA |
| 2942 | Hcd693 right | 0.26 | AGGCTTTGTGCGCGCATTAAAGCTCGCCGGACCCCCGACC |
| 2943 | mir-219-2No1 | 0.25 | CTCAGGGGCTTCGCCACTGATTGTCCAAACGCAATTCTTG |
| 2944 | Hcd145 left | 0.29 | AAAAATCCCAGCGGCCACCTTTCCTCCCTGCCCCATTGGG |
| 2945 | mir-155-prec | 0.29 | TTAATGCTAATCGTGATAGGGGTTTTTGCCTCCAACTGAC |
| 2946 | HPR213 right | 0.3 | AACAACTTTGTGCTGGTGCCGGGGAAGTTTGTGTCTCCAA |
| 2947 | mir-212-precNo2 | 0.34 | CGGACAGCGCGCCGGCACCTTGGCTCTAGACTGCTTACTG |
| 2948 | Hcd913 right | 0.33 | CAAACATCATGTGACGTCTGTGGAGCGGCGGCGGCGGCGG |
| 2949 | Hcd716 right | 0.51 | CAATAAATGTGCCTATAAAGGCGCCGGCTCCGGGGCGCGG |
| 2950 | MFR207 right | 0.26 | AACAACTTTGTGCTGGTGCCGGGGAAGTTTGTGTCTCCTA |
| 2951 | Hcd559 right | 0.33 | TTCTTTGTCTATACATTTCCTAGATTTCTATGCAGTTGGG |
| 2952 | Hcd654 left | 0.28 | AACGAGTAAAAGGCGTACATGGGAGCGCGGGGCGGCAGAG |
| 2953 | Hcd739 right | 0.27 | TATTAGCTGAGGGAGGGCTGGAGGCGGCTGCATTCCGACT |
| 2954 | mir-142-prec | 0.4 | CCCATAAAGTAGAAAGCACTACTAACAGCACTGGAGGGTG |

TABLE 116
Dacarbazine microRNA biomarkers.

| | | | |
|---|---|---|---|
| SEQ | | | |
| ID | | | |
| NO | Medianprobe | Corr | Sequence |

| | | | |
|---|---|---|---|
| 2955 | mir-092-prec-X = 092-2 | 0.25 | GTTCTATATAAAGTATTGCACTTGTCCCGGCCTGTGGAAG |
| 2956 | mir-123-precNo2 | 0.28 | TGTGACACTTCAAACTCGTACCGTGAGTAATAATGCGCCG |
| 2957 | mir-101-prec-9 | 0.29 | GCTGTATATCTGAAAGGTACAGTACTGTGATAACTGAAGA |
| 2958 | Hcd517 right | 0.3 | GAGGGATTACAGATTAACTCCCACTTCTCCAGACTCAGAA |
| 2959 | Hcd796 left | 0.37 | GGTGGGATTACCCGGCTGCCGCTGTCGCCTGGATGGTCTC |
| 2960 | Hcd749 right | 0.28 | CGAGGAGGAGGTGACTGCTGTGGATGGTTATGAGACAGAC |
| 2961 | Hcd674 left | 0.25 | CTCCAGTGTGGTGTGCCTGCCCCCTTCCGTCATTGCTGTG |
| 2962 | mir-019b-2-prec | 0.27 | GTGGCTGTGCAAATCCATGCAAAACTGATTGTGATAATGT |
| 2963 | mir-033-prec | 0.29 | GTGGTGCATTGTAGTTGCATTGCATGTTCTGGTGGTACCC |
| 2964 | mir092-prec-13 = 092-1No2 | 0.33 | TCTGTATGGTATTGCACTTGTCCCGGCCTGTTGAGTTTGG |
| 2965 | mir-124a-2-prec | 0.29 | TTAAGGCACGCGGTGAATGCCAAGAGCGGAGCCTACGGCT |
| 2966 | mir-143-prec | 0.36 | CTGGTCAGTTGGGAGTCTGAGATGAAGCACTGTAGCTCAG |
| 2967 | mir-516-43p | 0.28 | AAAGAAAAGAAAGTGCTTCCTTTCAGAGGGTTACTCTTTG |
| 2968 | mir-216-precNo1 | 0.31 | CTGGGATTATGCTAAACAGAGCAATTTCCTAGCCCTCACG |
| 2969 | Hcd731 left | 0.26 | AATTGTGACAACTGAGTGGGAGGTTTGTGTGATGATTATC |
| 2970 | mir-106-prec-X | 0.26 | CCTTGGCCATGTAAAAGTGCTTACAGTGCAGGTAGCTTTT |
| 2971 | mir-142-prec | 0.48 | CCCATAAAGTAGAAAGCACTACTAACAGCACTGGAGGGTG |
| 2972 | mir-223-prec | 0.48 | CAGTGTCAGTTTGTCAAATACCCCAAGTGCGGCACATGCT |
| 2973 | Hcd754 left | 0.32 | TCCTCCTCCTCCTTTTCGTTCCGGCTCCCTGGCTGGCTCC |
| 2974 | mir-018-prec | 0.27 | TAAGGTGCATCTAGTGCAGATAGTGAAGTAGATTAGCATC |

TABLE 117
Oxaliplatin microRNA biomarkers.

| | | | |
|---|---|---|---|
| SEQ | | | |
| ID | | | |
| NO | Medianprobe | Corr | Sequence |

| | | | |
|---|---|---|---|
| 2975 | mir-092-prec-X = 092-2 | 0.36 | GTTCTATATAAAGTATTGCACTTGTCCCGGCCTGTGGAAG |
| 2976 | mir-148-prec | 0.27 | TGAGTATGATAGAAGTCAGTGCACTACAGAACTTTGTCTC |
| 2977 | mir-20bNo1 | 0.27 | AGTACCAAAGTGCTCATAGTGCAGGTAGTTTTGGCATGAC |
| 2978 | mir-007-2-precNo2 | 0.28 | GGACCGGCTGGCCCCATCTGGAAGACTAGTGATTTTGTTG |
| 2979 | mir-017-precNo2 | 0.28 | GTCAGAATAATGTCAAAGTGCTTACAGTGCAGGTAGTGAT |
| 2980 | mir-019b-2-prec | 0.32 | GTGGCTGTGCAAATCCATGCAAAACTGATTGTGATAATGT |
| 2981 | Hcd760 left | 0.27 | TGTGGTCACGTTTCTCCCTCTCTGCTGGCCCCCATCTGTC |
| 2982 | Hcd783 left | 0.36 | CAGGCTCACACCTCCCTCCCCCAACTCTCTGGAATGTATA |
| 2983 | MPR216 left | 0.26 | GATCCTAGTAGTGCCAAAGTGCTCATAGTGCAGGTAGTTT |
| 2984 | mir-375 | 0.33 | TTTTGTTCGTTCGGCTCGCGTGAGGCAGGGGCGGCCTCTC |
| 2985 | mir-019b-1-prec | 0.36 | TTCTGCTGTGCAAATCCATGCAAAACTGACTGTGGTAGTG |
| 2986 | mir-135-2-prec | 0.32 | CACTCTAGTGCTTTATGGCTTTTTATTCCTATGTGATAGT |
| 2987 | mir-150-prec | 0.25 | CTCCCCATGGCCCTGTCTCCCAACCCTTGTACCAGTGCTG |
| 2988 | mir-128b-precNo1 | 0.33 | TCACAGTGAACCGGTCTCTTTCCCTACTGTGTCACACTCC |
| 2989 | mir-499No2 | 0.26 | GTGAACATCACAGCAAGTCTGTGCTGCTTCCCGTCCCTAC |
| 2990 | mir-025-prec | 0.38 | ACGCTGCCCTGGGCATTGCACTTGTCTCGGTCTGACAGTG |
| 2991 | mir-007-1-prec | 0.32 | TGTTGGCCTAGTTCTGTGTGGAAGACTAGTGATTTTGTTG |
| 2992 | mir-019a-prec | 0.33 | TGTAGTTGTGCAAATCTATGCAAAACTGATGGTGGCCTGC |
| 2993 | mir-093-prec-7.1 = 093-1 | 0.46 | CCAAAGTGCTGTTCGTGCAGGTAGTGTGATTACCCAACCT |
| 2994 | mir-106-prec-X | 0.45 | CCTTGGCCATGTAAAAGTGCTTACAGTGCAGGTAGCTTTT |
| 2995 | mir-142-prec | 0.41 | CCCATAAAGTAGAAAGCACTACTAACAGCACTGGAGGGTG |
| 2996 | HPR169 right | 0.34 | GTTTCTTTCTCACGGTAACTGGCAGCCTCGTTGTGGGCTG |
| 2997 | mir-018-prec | 0.4 | TAAGGTGCATCTAGTGCAGATAGTGAAGTAGATTAGCATC |
| 2998 | mir-020-prec | 0.44 | TAAAGTGCTTATAGTGCAGGTAGTGTTTAGTTATCTACTG |
| 2999 | mir-484 | 0.33 | GTCAGGCTCAGTCCCCTCCCGATAAACCCCTAAATAGGGA |

TABLE 118
Hydroxyurea microRNA biomarkers.

| | | | |
|---|---|---|---|
| SEQ | | | |
| ID | | | |
| NO | Medianprobe | Corr | Sequence |

| | | | |
|---|---|---|---|
| 3000 | Hcd257 left | 0.34 | CTTCTTGTATAAGCACTGTGCTAAAATTGCAGACACTAGG |
| 3001 | Hcd768 right | 0.26 | GCCCTGGCGGAACGCTGAGAAGACAGTCGAACTTGACTAT |
| 3002 | Hcd796 left | 0.25 | GGTGGGATTACCCGGCTGCCGCTGTCGCCTGGATGGTCTC |
| 3003 | HUMTRF | 0.48 | GATCTAAAGGTCCCTGGTTCGATCCCGGGTTTCGGCACCA |
| 3004 | HUMTRS | 0.3 | TCTAGCGACAGAGTGGTTCAATTCCACCTTTCGGGCGCCA |
| 3005 | MPR74 left | 0.28 | CAAAGGTCACAATTAACATTCATTGTTGTCGGTGGGTTGT |
| 3006 | mir-213-precNo1 | 0.29 | AACATTCATTGCTGTCGGTGGGTTGAACTGTCTGGACAAG |
| 3007 | mir-155-prec | 0.35 | TTAATGCTAATCGTGATAGGGGTTTTTGCCTCCAACTGAC |
| 3008 | Hcd763 right | 0.25 | GGTGCACTCTAAATTCCTGTCCCTGCGGAAGGCTGACTAA |
| 3009 | mir-181b-precNo1 | 0.28 | TGAGGTTGCTTCAGTGAACATTCAACGCTGTCGGTGAGTT |
| 3010 | ath-MIR180aNo2 | 0.26 | TGAGAATCTTGATGATGCTGCATCGGCAATCAACGACTAT |
| 3011 | mir-216-precNo1 | 0.37 | CTGGGATTATGCTAAACAGAGCAATTTCCTAGCCCTCACG |
| 3012 | mir-342No1 | 0.31 | GTCTCACACAGAAATCGCACCCGTCACCTTGGCCTACTTA |
| 3013 | mir-142-prec | 0.49 | CCCATAAAGTAGAAAGCACTACTAACAGCACTGGAGGGTG |
| 3014 | HSHELA01 | 0.31 | GGCCGCAGCAACCTCGGTTCGTATCCGAGTCACGGCACCA |
| 3015 | HUMTRV1A | 0.26 | ACGCGAAAGGTCCCCGGTTCGAAACCGGGCGGAAACACCA |
| 3016 | mir-223-prec | 0.59 | CAGTGTCAGTTTGTCAAATACCCCAAGTGCGGCACATGCT |
| 3017 | Hcd754 left | 0.46 | TCCTCCTCCTCCTTTTCGTTCCGGCTCCCTGGCTGGCTCC |
| 3018 | mir-020-prec | 0.26 | TAAAGTGCTTATAGTGCAGGTAGTGTTTAGTTATCTACTG |

TABLE 119
Tegafur microRNA biomarkers.

| | | | |
|---|---|---|---|
| SEQ | | | |
| ID | | | |
| NO | Medianprobe | Corr | Sequence |

| | | | |
|---|---|---|---|
| 3019 | Hcd257 right | 0.26 | CTTGGTTTTTGCAATAATGCTAGCAGAGTACACACAAGAA |
| 3020 | Hcd946 left | 0.26 | CACAGGATTTCAGGGGAGAAACGGTGGATTTTCACAAGAG |
| 3021 | Hcd503 left | 0.3 | GAGATGAGGTAGCTGCCAGGTGCCATGGGGGTATAGGTGA |
| 3022 | mir-429No1 | 0.25 | CTAATACTGTCTGGTAAAACCGTCCATCCGCTGCCTGATC |
| 3023 | Hcd693 right | 0.32 | AGGCTTTGTGCGCGCATTAAAGCTCGCCGGACCCCCGACC |
| 3024 | miR-373*No1 | 0.33 | GGGATACTCAAAATGGGGGCGCTTTCCTTTTTGTCTGTAC |
| 3025 | Hcd738 left | 0.28 | GAAAAACTTAAGATTCCCTCTCGGCCCTCATTTTTAGCTG |
| 3026 | mir-328No1 | 0.33 | GAAAGTGCATACAGCCCCTGGCCCTCTCTGCCCTTCCGTC |
| 3027 | Hcd783 left | 0.36 | CAGGCTCACACCTCCCTCCCCCAACTCTCTGGAATGTATA |
| 3028 | Hcd181 right | 0.34 | GCTCACTGGGCAGGAGCCCTAATCGGATTCGACAGCTGAG |
| 3029 | Hcd631 left | 0.38 | CAGATATTTTCTCAGGCAATCCTCAGCCACAGCCTTCTTG |
| 3030 | Hcd279 left | 0.25 | CGGACTAACACTCCGCGGGTGTTTCCATGGAGACCGAGGC |
| 3031 | mir-194-2No1 | 0.3 | TGGTTCCCGCCCCCTGTAACAGCAACTCCATGTGGAAGTG |
| 3032 | mir-197-prec | 0.38 | TAAGAGCTCTTCACCCTTCACCACCTTCTCCACCCAGCAT |
| 3033 | HPR163 left | 0.39 | GCTGCCCCCTCCCTTAGCAACGTGGCCCCGGCGTTCCAAA |
| 3034 | mir-150-prec | 0.32 | CTCCCCATGGCCCTGTCTCCCAACCCTTGTACCAGTGCTG |
| 3035 | Hcd323 left | 0.26 | GTTGTAGCATGTGGTTGTATTAATGAACGTTACAGGAGAG |
| 3036 | mir-103-2-prec | 0.28 | GTAGCATTCAGGTCAAGCAACATTGTACAGGGCTATGAAA |
| 3037 | Hcd243 right | 0.27 | TATTATACATCATTTCCCATCAATCGACGAACTAAAGCCT |
| 3038 | Hcd938 right | 0.27 | ATTCCCTGCATCACTCTCATGAAATGGCTGAGAAAGTGAG |
| 3039 | mir-025-prec | 0.29 | ACGCTGCCCTGGGCATTGCACTTGTCTCGGTCTGACAGTG |
| 3040 | mir-007-1-prec | 0.36 | TGTTGGCCTAGTTCTGTGTGGAAGACTAGTGATTTTGTTG |
| 3041 | MPR243 left | 0.26 | GTATTTACCTAGTTGTAATGTGGGTTGCCATGGTGTTTTG |
| 3042 | Hcd511 right | 0.27 | TACCTCAGAAGCCTCACTCAACCCTCTCCCGCTGAGTCTC |
| 3043 | Hcd654 left | 0.26 | AACGAGTAAAAGGCGTACATGGGAGCGCGGGGCGGCAGAG |
| 3044 | mir-199a-2-prec | 0.3 | TCGCCCCAGTGTTCAGACTACCTGTTCAGGACAATGCCGT |
| 3045 | mir-214-prec | 0.27 | TGTACAGCAGGCACAGACAGGCAGTCACATGACAACCCAG |
| 3046 | mir-093-prec-7.1 = 093-1 | 0.33 | CCAAAGTGCTGTTCGTGCAGGTAGTGTGATTACCCAACCT |
| 3047 | mir-106-prec-X | 0.27 | CCTTGGCCATGTAAAAGTGCTTACAGTGCAGGTAGCTTTT |
| 3048 | Hcd794 right | 0.41 | GGCCACCACAGACACCAACAAGTTCAGTCCGTTTCTGCAG |
| 3049 | Hcd530 right | 0.26 | AAGGAAAATCAAACCCACAATGCTGAACACAACAATGACC |
| 3050 | HSHELA01 | 0.34 | GGCCGCAGCAACCTCGGTTCGTATCCGAGTCACGGCACCA |
| 3051 | Hcd754 left | 0.29 | TCCTCCTCCTCCTTTTCGTTCCGGCTCCCTGGCTGGCTCC |
| 3052 | mir-020-prec | 0.29 | TAAAGTGCTTATAGTGCAGGTAGTGTTTAGTTATCTACTG |

TABLE 120
Daunorubicin microRNA biomarkers.

| | | | |
|---|---|---|---|
| SEQ | | | |
| ID | | | |
| NO | Medianprobe | Corr | Sequence |

| | | | |
|---|---|---|---|
| 3053 | Hcd768 right | 0.25 | GCCCTGGCGGAACGCTGAGAAGACAGTCGAACTTGACTAT |
| 3054 | HUMTRF | 0.34 | GATCTAAAGGTCCCTGGTTCGATCCCGGGTTTCGGCACCA |
| 3055 | Hcd145 left | 0.28 | AAAAATCCCAGCGGCCACCTTTCCTCCCTGCCCCATTGGG |
| 3056 | Hcd923 right | 0.27 | CTGGAGATAATGATTCTGCATTTCTAATTAACTCCCAGGT |
| 3057 | mir-216-precNo1 | 0.27 | CTGGGATTATGCTAAACAGAGCAATTTCCTAGCCCTCACG |
| 3058 | mir-093-prec-7.1 = 093-1 | 0.25 | CCAAAGTGCTGTTCGTGCAGGTAGTGTGATTACCCAACCT |
| 3059 | mir-342No1 | 0.33 | GTCTCACACAGAAATCGCACCCGTCACCTTGGCCTACTTA |
| 3060 | Hcd794 right | 0.28 | GGCCACCACAGACACCAACAAGTTCAGTCCGTTTCTGCAG |
| 3061 | mir-142-prec | 0.48 | CCCATAAAGTAGAAAGCACTACTAACAGCACTGGAGGGTG |
| 3062 | HSHELA01 | 0.3 | GGCCGCAGCAACCTCGGTTCGTATCCGAGTCACGGCACCA |
| 3063 | mir-223-prec | 0.33 | GAGTGTCAGTTTGTCAAATACCCCAAGTGCGGCACATGCT |
| 3064 | Hcd754 left | 0.32 | TCCTCCTCCTCCTTTTCGTTCCGGCTCCCTGGCTGGCTCC |

TABLE 121
Bleomycin microRNA biomarkers.

| SEQ | | | |
|---|---|---|---|
| ID | | | |
| NO | Medianprobe | Corr | Sequence |
| 3065 | mir-125b-2-precNo2 | 0.29 | ACCAGACTTTTCCTAGTCCCTGAGACCCTAACTTGTGAGG |
| 3066 | mir-022-prec | 0.26 | TGTCCTGACCCAGCTAAAGCTGCCAGTTGAAGAACTGTTG |
| 3067 | mir-125b-1 | 0.29 | TCCCTGAGACCCTAACTTGTGATGTTTACCGTTTAAATCC |
| 3068 | mir-155-prec | 0.38 | TTAATGCTAATCGTGATAGGGGTTTTTGCCTCCAACTGAC |
| 3069 | mir-100No1 | 0.25 | CCTGTTGCCACAAACCCGTAGATCCGAACTTGTGGTATTA |
| 3070 | mir-409-3p | 0.27 | GACGAATGTTGCTCGGTGAACCCCTTTTCGGTATCAAATT |
| 3071 | mir-495No1 | 0.31 | GTGACGAAACAAACATGGTGCACTTCTTTTTCGGTATCAA |
| 3072 | mir-199a-2-prec | 0.29 | TCGCCCCAGTGTTCAGACTACCTGTTCAGGACAATGCCGT |
| 3073 | mir-382 | 0.28 | GGTACTTGAAGAGAAGTTGTTCGTGGTGGATTCGCTTTAC |
| 3074 | mir-100-1/2-prec | 0.26 | TGAGGCCTGTTGCCACAAACCCGTAGATCCGAACTTGTGG |

TABLE 122
Estramustine microRNA biomarkers.

| SEQ | | | |
|---|---|---|---|
| ID | | | |
| NO | Medianprobe | Corr | Sequence |
| 3075 | Hcd338 left | 0.32 | CTTCTCCTCCTGTTCGCCGCAGGCGCCCGTCCCAGTAGTC |
| 3076 | mir-099b-prec-19No1 | 0.25 | GCCTTCGCCGCACACAAGCTCGTGTCTGTGGGTCCGTGTC |
| 3077 | mir-149-prec | 0.34 | CGAGCTCTGGCTCCGTGTCTTCACTCCCGTGCTTGTCCGA |

TABLE 123
Chlorambucil microRNA biomarkers.

| SEQ | | | |
|---|---|---|---|
| ID | | | |
| NO | Medianprobe | Corr | Sequence |
| 3078 | mir-181a-precNo1 | 0.26 | TCAGAGGACTCCAAGGAACATTCAACGCTGTCGGTGAGTT |
| 3079 | mir-181c-precNo1 | 0.25 | TGCCAAGGGTTTGGGGGAACATTCAACCTGTCGGTGAGTT |
| 3080 | HUMTRF | 0.35 | GATCTAAAGGTCCCTGGTTCGATCCCGGGTTTCGGCACCA |
| 3081 | mir-181dNo1 | 0.26 | GAGGTCACAATCAACATTCATTGTTGTCGGTGGGTTGTGA |
| 3082 | MPR74 left | 0.28 | CAAAGGTCACAATTAACATTCATTGTTGTCGGTGGGTTGT |
| 3083 | Hcd817 left | 0.28 | TAATGAGAATTATGTTTGCACATTGAGGCAGGATAAATCC |
| 3084 | mir-213-precNo1 | 0.42 | AACATTCATTGCTGTCGGTGGGTTGAACTGTGTGGACAAG |
| 3085 | mir-155-prec | 0.33 | TTAATGCTAATCGTGATAGGGGTTTTTGCCTCCAACTGAC |
| 3086 | Hcd148_HPR225left | 0.29 | AATTAATGACCAAAATGTCAGATGTGTCCACAGCTAATTA |
| 3087 | mir-515-15p | 0.27 | GATCTCATGCAGTCATTCTCCAAAAGAAAGCACTTTCTGT |
| 3088 | mir-181b-precNo1 | 0.41 | TGAGGTTGCTTCAGTGAACATTCAACGCTGTCGGTGAGTT |
| 3089 | HUMTRN | 0.27 | CAATCGGTTAGCGCGTTCGGCTGTTAACCGAAAGGTTGGT |
| 3090 | mir-128b-precNo1 | 0.37 | TCACAGTGAACCGGTCTCTTTCCCTACTGTGTCACACTCC |
| 3091 | mir-450-2No1 | 0.29 | GAAAGATGCTAAACTATTTTTGCGATGTGTTCCTAATATG |
| 3092 | mir-216-precNo1 | 0.29 | CTGGGATTATGCTAAACAGAGCAATTTCCTAGCCCTCACG |
| 3093 | mir-342No1 | 0.35 | GTCTCACACAGAAATCGCACCCGTCACCTTGGCCTACTTA |
| 3094 | mir-142-prec | 0.45 | CCCATAAAGTAGAAAGCACTACTAACAGCACTGGAGGGTG |
| 3095 | mir-223-prec | 0.39 | GAGTGTCAGTTTGTCAAATACCCCAAGTGCGGCACATGCT |
| 3096 | Hcd754 left | 0.37 | TCCTCCTCCTCCTTTTCGTTCCGGCTCCCTGGCTGGCTCC |
| 3097 | mir-020-prec | 0.28 | TAAAGTGCTTATAGTGCAGGTAGTGTTTAGTTATCTACTG |

TABLE 124
Mechlorethamine microRNA biomarkers.

| | | | |
|---|---|---|---|
| SEQ | | | |
| ID | | | |
| NO | Medianprobe | Corr | Sequence |

| | | | |
|---|---|---|---|
| 3098 | mir-124a-3-prec | 0.33 | TTAAGGCACGCGGTGAATGCCAAGAGAGGCGCCTCCGCCG |
| 3099 | Hcd946 left | 0.3 | CACAGGATTTCAGGGGAGAAACGGTGGATTTTCACAAGAG |
| 3100 | Hcd683 left | 0.29 | CTATGACAGAAGGTACTCTGTGGGAGGGAGGAGATAATAG |
| 3101 | HPR264 right | 0.25 | CAAATGGCGCATCAATGACTATCGCTCTTACAAAGCTCTT |
| 3102 | MPR185 right | 0.3 | CAGAACATGCAATGCAACTACAATGCACCACAGCTGCCCG |
| 3103 | HUMTRF | 0.37 | GATCTAAAGGTCCCTGGTTCGATCCCGGGTTTCGGCACCA |
| 3104 | Hcd294 left | 0.25 | TTATCATAAAATAATCACAGCCCTCAGGTGCTGTGAGGCA |
| 3105 | Hcd503 left | 0.27 | GAGATGAGGTAGCTGCCAGGTGCCATGGGGGTATAGGTGA |
| 3106 | mir-20bNo1 | 0.27 | AGTACCAAAGTGCTCATAGTGCAGGTAGTTTTGGCATGAC |
| 3107 | MPR74 left | 0.25 | CAAAGGTCACAATTAACATTCATTGTTGTCGGTGGGTTGT |
| 3108 | MPR234 right | 0.28 | GCTGACGTCACGGGCAGAATTGTCCCATTTAGGGATCCCG |
| 3109 | Hcd447 right | 0.26 | CTCAGGCCATTAACCTCAGTTGGTCACTAATCCCTAGGAA |
| 3110 | Hcd817 right | 0.3 | GAATCTTGCCCTTGGATGCATACTGTAATTTCCATTAAAG |
| 3111 | Hcd148_HPR225left | 0.32 | AATTAATGACCAAAATGTCAGATGTGTCCACAGCTAATTA |
| 3112 | mir-515-15p | 0.29 | GATCTCATGCAGTCATTCTCCAAAAGAAAGCACTTTCTGT |
| 3113 | Hcd383 right | 0.25 | CTGATAGTACACGGGGCCAAAATAGATGTATGCTTCTAAG |
| 3114 | mir-181b-precNo2 | 0.31 | ACCATCGACCGTTGATTGTACCCTATGGCTAACCATCATC |
| 3115 | Hcd783 left | 0.33 | CAGGCTCACACCTCCCTCCCCCAACTCTCTGGAATGTATA |
| 3116 | MPR224 left | 0.34 | TGAGGCCCTCTAGGCCGTGAATTAATGTGTCATAACTCAC |
| 3117 | HPR172 right | 0.28 | GTTTAAACAGCCAGTGCAAACATTTAGATCTGAGTCAAAA |
| 3118 | MPR216 left | 0.32 | GATCCTAGTAGTGCCAAAGTGCTCATAGTGCAGGTAGTTT |
| 3119 | HUMTRN | 0.28 | CAATCGGTTAGCGCGTTCGGCTGTTAACCGAAAGGTTGGT |
| 3120 | mir-321No1 | 0.3 | TTGGCCTCCTAAGCCAGGGATTGTGGGTTCGAGTCCCACC |
| 3121 | HFR159 left | 0.25 | TCCGTCACTTGAACTGGCTGCCAGCGTTCACAGACAGCTG |
| 3122 | MPR228 left | 0.29 | TTTTTGCTCCCAGTCAGTAGGAAGATTGTTTCAAATCTGT |
| 3123 | ath-MIR180aNo2 | 0.31 | TGAGAATCTTGATGATGCTGCATCGGCAATCAACGACTAT |
| 3124 | mir-197-prec | 0.28 | TAAGAGCTCTTCACCCTTCACCACCTTCTCCACCCAGCAT |
| 3125 | mir-124a-1-prec1 | 0.26 | ATACAATTAAGGCACGCGGTGAATGCCAAGAATGGGGCTG |
| 3126 | mir-128b-precNo1 | 0.31 | TCACAGTGAACCGGTCTCTTTCCCTACTGTGTCACACTCC |
| 3127 | Hcd28_HPR39left | 0.28 | CTGACTTTCAGTTCCTATTTAAAATGTCTGAATTGGGAGC |
| 3128 | Hcd889 right | 0.25 | ATGCCTTGTGCTCTGTGCTAATTCAGAAGAATAAGCCTGT |
| 3129 | Hcd350 right | 0.26 | TAGCACTTAGCAGGTTGTATTATCATTGTCCGTGTCTATG |
| 3130 | mir-025-prec | 0.31 | ACGCTGCCCTGGGCATTGCACTTGTCTCGGTCTGACAGTG |
| 3131 | mir-208-prec | 0.27 | ACCTGATGCTCACGTATAAGACGAGCAAAAAGCTTGTTGG |
| 3132 | mir-450-2No1 | 0.25 | GAAAGATGCTAAACTATTTTTGCGATGTGTTCCTAATATG |
| 3133 | Hcd923 right | 0.29 | CTGGAGATAATGATTCTGCATTTCTAATTAACTCCCAGGT |
| 3134 | Hcd434 right | 0.28 | CACTTTTTCCTTTGTGGAAATCCTGGGTGACATCACCTCC |
| 3135 | HPR129 left | 0.27 | TTTTCCTGCTTGATTTGCTTAATGGAAGCTGACAGTGAAG |
| 3136 | HPR220 left | 0.27 | GGAGACACTGTAACAACATTTTACTCCTGACTGATTACAT |
| 3137 | mir-380-5p | 0.3 | AGGTACCTGAAAAGATGGTTGACCATAGAACATGCGCTAT |
| 3138 | mir-093-prec-7.1 = 093-1 | 0.29 | CCAAAGTGCTGTTCGTGCAGGTAGTGTGATTACCCAACCT |
| 3139 | mir-106-prec-X | 0.3 | CCTTGGCCATGTAAAAGTGCTTACAGTGCAGGTAGCTTTT |
| 3140 | mir-342No1 | 0.28 | GTCTCACACAGAAATCGCACCCGTCACCTTGGCCTACTTA |
| 3141 | mir-142-prec | 0.45 | CCCATAAAGTAGAAAGCACTACTAACAGCACTGGAGGGTG |
| 3142 | HSHELA01 | 0.29 | GGCCGCAGCAACCTCGGTTCGTATCCGAGTCACGGCACCA |
| 3143 | mir-223-prec | 0.32 | GAGTGTCAGTTTGTCAAATACCCCAAGTGCGGCACATGCT |
| 3144 | Hcd754 left | 0.32 | TCCTCCTCCTCCTTTTCGTTCCGGCTCCCTGGCTGGCTCC |
| 3145 | mir-020-prec | 0.37 | TAAAGTGCTTATAGTGCAGGTAGTGTTTAGTTATCTACTG |
| 3146 | mir-4323p | 0.26 | CCTTACGTGGGCCACTGGATGGCTCCTCCATGTCTTGGAG |

TABLE 125
Streptozocin microRNA biomarkers.

| | | | |
|---|---|---|---|
| SEQ | | | |
| ID | | | |
| NO | Medianprobe | Corr | Sequence |

| | | | |
|---|---|---|---|
| 3147 | mir-483No1 | 0.2 | ATCACGCCTCCTCACTCCTCTCCTCCCGTCTTCTCCTCTC |
| 3148 | Hcd631 right | 0.21 | AAAACCAAATGGCTGGCTACTCATGTACTGTTGAATGTCT |
| 3149 | mir-212-precNo1 | 0.24 | CCTCAGTAACAGTCTCCAGTCACGGCCACCGACGCCTGGC |
| 3150 | Hcd938 right | 0.21 | ATTCCCTGCATCACTCTCATGAAATGGCTGAGAAAGTGAG |
| 3151 | MPR133 right | 0.2 | CTGTAGATACTTTCTCCCTGAGCCCCTCCTGCCCCCCTGC |
| 3152 | Hcd794 right | 0.21 | GGCCACCACAGACACCAACAAGTTCAGTCCGTTTCTGCAG |
| 3153 | Hcd438 left | 0.24 | GTTTATTTGAATGTGTGATGGGGAGGTCATCAAAATGAAC |
| 3154 | Hcd886 right | 0.23 | CTCCAGTTGGGGGTGGGGAGTTGGGAACAGTGTGAATGGG |

TABLE 126
Carmustine microRNA biomarkers.

| | | | |
|---|---|---|---|
| SEQ | | | |
| ID | | | |
| NO | Medianprobe | Corr | Sequence |

| | | | |
|---|---|---|---|
| 3155 | mir-092-prec-X = 092-2 | 0.33 | GTTCTATATAAAGTATTGCACTTGTCCCGGCCTGTGGAAG |
| 3156 | Hcd517 right | 0.33 | GAGGGATTACAGATTAACTCCCACTTCTCCAGACTCAGAA |
| 3157 | Hcd796 left | 0.28 | GGTGGGATTACCCGGCTGCCGCTGTCGCCTGGATGGTCTC |
| 3158 | HUMTRF | 0.33 | GATCTAAAGGTCCCTGGTTCGATCCCGGGTTTCGGCACCA |
| 3159 | mir-20bNo1 | 0.29 | AGTACCAAAGTGCTCATAGTGCAGGTAGTTTTGGCATGAC |
| 3160 | mir-019b-2-prec | 0.25 | GTGGCTGTGCAAATCCATGCAAAACTGATTGTGATAATGT |
| 3161 | mir-033-prec | 0.27 | GTGGTGCATTGTAGTTGCATTGCATGTTCTGGTGGTACCC |
| 3162 | mir-092-prec-13 = 092-1No2 | 0.33 | TCTGTATGGTATTGCACTTGTCCCGGCCTGTTGAGTTTGG |
| 3163 | Hcd148_HPR225left | 0.27 | AATTAATGACCAAAATGTCAGATGTGTCCACAGCTAATTA |
| 3164 | HUMTRAB | 0.3 | ATGGTAGAGCGCTCGCTTTGCTTGCGAGAGGTAGCGGGAT |
| 3165 | Hcd975 left | 0.26 | GGTTTTGTGTTTTTGTAAACAGCAGAAGGTATTAGTCCAT |
| 3166 | mir-135-2-prec | 0.28 | CACTCTAGTGCTTTATGGCTTTTTATTCCTATGTGATAGT |
| 3167 | mir-128b-precNo1 | 0.27 | TCACAGTGAACCGGTCTCTTTCCCTACTGTGTCACACTCC |
| 3168 | mir-143-prec | 0.32 | CTGGTCAGTTGGGAGTCTGAGATGAAGCACTGTAGCTCAG |
| 3169 | mir-025-prec | 0.33 | ACGCTGCCCTGGGCATTGCACTTGTCTCGGTCTGACAGTG |
| 3170 | mir-216-precNo1 | 0.34 | CTGGGATTATGCTAAACAGAGCAATTTCCTAGCCCTCACG |
| 3171 | mir-093-prec-7.1 = 093-1 | 0.3 | CCAAAGTGCTGTTCGTGCAGGTAGTGTGATTACCCAACCT |
| 3172 | mir-106-prec-X | 0.33 | CCTTGGCCATGTAAAAGTGCTTACAGTGCAGGTAGCTTTT |
| 3173 | mir-142-prec | 0.61 | CCCATAAAGTAGAAAGCACTACTAACAGCACTGGAGGGTG |
| 3174 | HSHELA01 | 0.26 | GGCCGCAGCAACCTCGGTTCGTATCCGAGTCACGGCACCA |
| 3175 | HUMTRV1A | 0.26 | ACGCGAAAGGTCCCCGGTTCGAAACCGGGCGGAAACACCA |
| 3176 | mir-223-prec | 0.52 | GAGTGTCAGTTTGTCAAATACCCCAAGTGCGGCACATGCT |
| 3177 | Hcd754 left | 0.46 | TCCTCCTCCTCCTTTTCGTTCCGGCTCCCTGGCTGGCTCC |
| 3178 | mir-018-prec | 0.34 | TAAGGTGCATCTAGTGCAGATAGTGAAGTAGATTAGCATC |
| 3179 | mir-020-prec | 0.35 | TAAAGTGCTTATAGTGCAGGTAGTGTTTAGTTATCTACTG |

TABLE 127
Lornustine microRNA biomarkers.

| SEQ | | | |
|---|---|---|---|
| ID | | | |
| NO | Medianprobe | Corr | Sequence |
| 3180 | mir-101-prec-9 | 0.27 | GCTGTATATCTGAAAGGTACAGTACTGTGATAACTGAAGA |
| 3181 | Hcd796 left | 0.26 | GGTGGGATTACCCGGCTGCCGCTGTCGCCTGGATGGTCTC |
| 3182 | mir-20bNo1 | 0.28 | AGTACCAAAGTGCTCATAGTGCAGGTAGTTTTGGCATGAC |
| 3183 | HUMTRAB | 0.35 | ATGGTAGAGCGCTCGCTTTGCTTGCGAGAGGTAGCGGGAT |
| 3184 | mir-135-2-prec | 0.27 | CACTCTAGTGCTTTATGGCTTTTTATTCCTATGTGATAGT |
| 3185 | mir-153-1-prec1 | 0.32 | CAGTTGCATAGTCACAAAAGTGATCATTGGCAGGTGTGGC |
| 3186 | mir-025-prec | 0.29 | ACGCTGCCCTGGGCATTGCACTTGTCTCGGTCTGACAGTG |
| 3187 | mir-093-prec-7.1 = 093-1 | 0.26 | CCAAAGTGCTGTTCGTGCAGGTAGTGTGATTACCCAACCT |
| 3188 | mir-106-prec-X | 0.31 | CCTTGGCCATGTAAAAGTGCTTACAGTGCAGGTAGCTTTT |
| 3189 | mir-142-prec | 0.41 | CCCATAAAGTAGAAAGCACTACTAACAGCACTGGAGGGTG |
| 3190 | HUMTRV1A | 0.28 | ACGCGAAAGGTCCCCGGTTCGAAACCGGGCGGAAACACCA |
| 3191 | Hcd754 left | 0.35 | TCCTCCTCCTCCTTTTCGTTCCGGCTCCCTGGCTGGCTCC |
| 3192 | mir-018-prec | 0.27 | TAAGGTGCATCTAGTGCAGATAGTGAAGTAGATTAGCATC |
| 3193 | mir-020-prec | 0.28 | TAAAGTGCTTATAGTGCAGGTAGTGTTTAGTTATCTACTG |

TABLE 128
Mercaptopurine microRNA biomarkers.

| | | | |
|---|---|---|---|
| SEQ | | | |
| ID | | | |
| NO | Medianprobe | Corr | Sequence |

| | | | |
|---|---|---|---|
| 3194 | mir-092-prec-X = 092-2 | 0.39 | GTTCTATATAAAGTATTGCACTTGTCCCGGCCTGTGGAAG |
| 3195 | mir-096-prec-7No1 | 0.26 | CTCCGCTCTGAGCAATCATGTGCAGTGCCAATATGGGAAA |
| 3196 | mir-123-precNo2 | 0.32 | TGTGACACTTCAAACTCGTACCGTGAGTAATAATGCGCCG |
| 3197 | MPR249 left | 0.26 | TCGGTTTGGTTCAGCTGGTATGCTTTCCAGTATCTCATTC |
| 3198 | HPR232 right | 0.28 | TGAATTATTGCACAATAAATTCATGCCCTGTTGTGTCTTA |
| 3199 | mir-101-prec-9 | 0.4 | GCTGTATATCTGAAAGGTACAGTACTGTGATAACTGAAGA |
| 3200 | mir-106aNo1 | 0.31 | CCTTGGCCATGTAAAAGTGCTTACAGTGCAGGTAGCTTTT |
| 3201 | mir-20bNo1 | 0.38 | AGTACCAAAGTGCTCATAGTGCAGGTAGTTTTGGCATGAC |
| 3202 | Hcd861 right | 0.25 | AAGGTCTGGATTGATCGTACTGCTTTCTGAAAGGTAAAAA |
| 3203 | mir-017-precNo2 | 0.26 | GTCAGAATAATGTCAAAGTGCTTACAGTGCAGGTAGTGAT |
| 3204 | mir-019b-2-prec | 0.33 | GTGGCTGTGCAAATCCATGCAAAACTGATTGTGATAATGT |
| 3205 | mir-033-prec | 0.3 | GTGGTGCATTGTAGTTGCATTGCATGTTCTGGTGGTACCC |
| 3206 | Hcd102 left | 0.26 | ACTGGAATTATGTTTTATCTTAAGTCCACACTGGATCCTC |
| 3207 | MPR216 left | 0.32 | GATCCTAGTAGTGCCAAAGTGCTCATAGTGCAGGTAGTTT |
| 3208 | Hcd975 left | 0.25 | GGTTTTGTGTTTTTGTAAACAGCAGAAGGTATTAGTCCAT |
| 3209 | mir-019b-1-prec | 0.3 | TTCTGCTGTGCAAATCCATGCAAAACTGACTGTGGTAGTG |
| 3210 | mir-135-2-prec | 0.38 | CACTCTAGTGCTTTATGGCTTTTTATTCCTATGTGATAGT |
| 3211 | Hcd581 right | 0.26 | AGGAGATATGCCAAGATATATTCACAGCTTTATATACACA |
| 3212 | Hcd536_HPR104 right | 0.25 | GCTGCTCTGCTGAGGGGCTGGACTCTGTCCAGAAGCACCA |
| 3213 | mir-128b-precNo2 | 0.25 | GGGGGCCGATACACTGTACGAGAGTGAGTAGCAGGTCTCA |
| 3214 | HSTRNL | 0.37 | TCCGGATGGAGCGTGGGTTCGAATCCCACTTCTGACACCA |
| 3215 | mir-025-prec | 0.47 | ACGCTGCCCTGGGCATTGCACTTGTCTCGGTCTGACAGTG |
| 3216 | mir-18bNo2 | 0.27 | AGCAGCTTAGAATCTACTGCCCTAAATGCCCCTTCTGGCA |
| 3217 | HPR262 left | 0.26 | TCAGTTTGGTTCAGCTGGTATGCTTTCCAGTATCTCATTC |
| 3218 | Hcd923 right | 0.33 | CTGGAGATAATGATTCTGCATTTCTAATTAACTCCCAGGT |
| 3219 | Hcd434 right | 0.3 | CACTTTTTCCTTTGTGGAAATCCTGGGTGACATCACCTCC |
| 3220 | Hcd658 right | 0.28 | GACTGCAGAGCAAAAGACACGATGGGTGTCTATTGTTTTC |
| 3221 | HPR129 left | 0.29 | TTTTCCTGCTTGATTTGCTTAATGGAAGCTGACAGTGAAG |
| 3222 | mir-380-5p | 0.32 | AGGTACCTGAAAAGATGGTTGACCATAGAACATGCGCTAT |
| 3223 | mir-093-prec-7.1 = 093-1 | 0.45 | CCAAAGTGCTGTTCGTGCAGGTAGTGTGATTACCCAACCT |
| 3224 | mir-106-prec-X | 0.5 | CCTTGGCCATGTAAAAGTGCTTACAGTGCAGGTAGCTTTT |
| 3225 | Hcd627 left | 0.31 | GCATTAGGGAGAATAGTTGATGGATTACAAATCTCTGCAT |
| 3226 | mir-142-prec | 0.33 | CCCATAAAGTAGAAAGCACTACTAACAGCACTGGAGGGTG |
| 3227 | mir-018-prec | 0.46 | TAAGGTGCATCTAGTGCAGATAGTGAAGTAGATTAGCATC |
| 3228 | mir-020-prec | 0.5 | TAAAGTGCTTATAGTGCAGGTAGTGTTTAGTTATCTACTG |

TABLE 129
Teniposide microRNA biomarkers.

| | | | |
|---|---|---|---|
| SEQ | | | |
| ID | | | |
| NO | Medianprobe | Corr | Sequence |

| | | | |
|---|---|---|---|
| 3229 | mir-124a-3-prec | 0.25 | TTAAGGCACGCGGTGAATGCCAAGAGAGGCGCCTCCGCCG |
| 3230 | Hcd768 right | 0.28 | GCCCTGGCGGAACGCTGAGAAGACAGTCGAACTTGACTAT |
| 3231 | HUMTRF | 0.28 | GATCTAAAGGTCCCTGGTTCGATCCCGGGTTTCGGCACCA |
| 3232 | mir-213-precNo1 | 0.25 | AACATTCATTGCTGTCGGTGGGTTGAACTGTGTGGACAAG |
| 3233 | mir-181b-precNo2 | 0.28 | ACCATCGACCGTTGATTGTACCCTATGGCTAACCATCATC |
| 3234 | Hcd783 left | 0.28 | CAGGCTCACACCTCCCTCCCCCAACTCTCTGGAATGTATA |
| 3235 | mir-212-precNo2 | 0.32 | CGGACAGCGCGCCGGCACCTTGGCTCTAGACTGCTTACTG |
| 3236 | mir-124a-1-prec1 | 0.25 | ATACAATTAAGGCACGCGGTGAATGCCAAGAATGGGGCTG |
| 3237 | mir-342No1 | 0.29 | GTCTCACACAGAAATCGCACCCGTCACCTTGGCCTACTTA |
| 3238 | mir-142-prec | 0.49 | CCCATAAAGTAGAAAGCACTACTAACAGCACTGGAGGGTG |
| 3239 | HSHELA01 | 0.3 | GGCCGCAGCAACCTCGGTTCGTATCCGAGTCACGGCACCA |
| 3240 | mir-223-prec | 0.27 | GAGTGTCAGTTTGTCAAATACCCCAAGTGCGGCACATGCT |
| 3241 | Hcd754 left | 0.29 | TCCTCCTCCTCCTTTTCGTTCCGGCTCCCTGGCTGGCTCC |

TABLE 130
Dactinomycin microRNA biomarkers.

| | | | |
|---|---|---|---|
| SEQ | | | |
| ID | | | |
| NO | Medianprobe | Corr | Sequence |

| | | | |
|---|---|---|---|
| 3242 | mir-025-prec | 0.27 | ACGCTGCCCTGGGCATTGCACTTGTCTCGGTCTGACAGTG |
| 3243 | mir-007-1-prec | 0.28 | TGTTGGCCTAGTTCTGTGTGGAAGACTAGTGATTTTGTTG |
| 3244 | mir-093-prec-7.1 = 093-1 | 0.3 | CCAAAGTGCTGTTCGTGCAGGTAGTGTGATTACCCAACCT |
| 3245 | Hcd794 right | 0.33 | GGCCACCACAGACACCAACAAGTTCAGTCCGTTTCTGCAG |
| 3246 | mir-142-prec | 0.34 | CCCATAAAGTAGAAAGCACTACTAACAGCACTGGAGGGTG |

TABLE 131
Tretinoin microRNA biomarkers.

| | | | |
|---|---|---|---|
| SEQ | | | |
| ID | | | |
| NO | Medianprobe | Corr | Sequence |

| | | | |
|---|---|---|---|
| 3247 | Hcd257 left | 0.42 | CTTCTTGTATAAGCACTGTGCTAAAATTGCAGACACTAGG |
| 3248 | mir-148-prec | 0.45 | TGAGTATGATAGAAGTCAGTGCACTACAGAACTTTGTCTC |
| 3249 | Hcd512 left | 0.28 | CTGCGCTCTCGGAAATGACTCGCTCCAATCCCGCTTCGCG |
| 3250 | HPR227 right | 0.25 | CAGTGCAATGATATTGTCAAAGCATCTGGGACCAGCCTTG |
| 3251 | Hcd421 right | 0.37 | AGTAAACAATGTCGGCTTTCCGCCTCCTCCCCTGCCATCC |
| 3252 | MPR203 left | 0.39 | CTATATTGGACCGCAGCGCTGAGAGCTTTTGTGTTTAATG |
| 3253 | mir-017-precNo1 | 0.26 | GCATCTACTGCAGTGAAGGCACTTGTAGCATTATGGTGAC |
| 3254 | mir-219-2No1 | 0.26 | CTCAGGGGCTTCGCCACTGATTGTCCAAACGCAATTCTTG |
| 3255 | mir-328No1 | 0.3 | GAAAGTGCATACAGCCCCTGGCCCTCTCTGCCCTTCCGTC |
| 3256 | Hcd783 left | 0.31 | CAGGCTCACACCTCCCTCCCCCAACTCTCTGGAATGTATA |
| 3257 | Hcd181 left | 0.32 | TTGGCGTCCTTGTCTCTCTCTCCCCTGCCCAGTGGCCTCC |
| 3258 | HPR213 right | 0.3 | AACAACTTTGTGCTGGTGCCGGGGAAGTTTGTGTCTCCAA |
| 3259 | mir-191-prec | 0.31 | CAACGGAATCCCAAAAGCAGCTGTTGTCTCCAGAGCATTC |
| 3260 | mir-375 | 0.31 | TTTTGTTCGTTCGGCTCGCGTGAGGCAGGGGCGGCCTCTC |
| 3261 | mir-212-precNo2 | 0.26 | CGGACAGCGCGCCGGCACCTTGGCTCTAGACTGCTTACTG |
| 3262 | Hcd913 right | 0.34 | CAAACATCATGTGACGTCTGTGGAGCGGCGGCGGCGGCGG |
| 3263 | Hcd716 right | 0.48 | CAATAAATGTGCCTATAAAGGCGCCGGCTCCGGGGCGCGG |
| 3264 | MPR207 right | 0.3 | AACAACTTTGTGCTGGTGCCGGGGAAGTTTGTGTCTCCTA |
| 3265 | HPR206 left | 0.26 | CTATATTGGACCGCAGCGCTGAGAGCTTTTGTGTTTAATG |
| 3266 | mir-016b-chr3 | 0.29 | GTTCCACTCTAGCAGCACGTAAATATTGGCGTAGTGAAAT |
| 3267 | Hcd654 left | 0.34 | AACGAGTAAAAGGCGTACATGGGAGCGCGGGGCGGCAGAG |
| 3268 | mir-195-prec | 0.3 | TCTAGCAGCACAGAAATATTGGCACAGGGAAGCGAGTCTG |
| 3269 | Hcd425 left | 0.25 | GGTTCTACTCTCTTACCCCTCCCCCACGTGGTTGTTGCTG |
| 3270 | mir-148aNo1 | 0.35 | TGAGTATGATAGAAGTCAGTGCACTACAGAACTTTGTCTC |
| 3271 | mir-142-prec | 0.36 | CCCATAAAGTAGAAAGCACTACTAACAGCACTGGAGGGTG |
| 3272 | mir-016a-chr13 | 0.25 | CAATGTCAGCAGTGCCTTAGCAGCACGTAAATATTGGCGT |

TABLE 132
Ifosfamide microRNA biomarkers.

| | | | |
|---|---|---|---|
| SEQ | | | |
| ID | | | |
| NO | Medianprobe | Corr | Sequence |

| | | | |
|---|---|---|---|
| 3273 | mir-092-prec-X = 092-2 | 0.28 | GTTCTATATAAAGTATTGCACTTGTCCCGGCCTGTGGAAG |
| 3274 | mir-181b-2No1 | 0.28 | CTGATGGCTGCACTCAACATTCATTGCTGTCGGTGGGTTT |
| 3275 | Hcd417 right | 0.28 | GGATTTAATGAGAAATATTGAGCCCTTTGGTTCAGGAACT |
| 3276 | Hcd440_HPR257 right | 0.28 | GCTCTGTTGTGATAAATTGGCTGTGTGCTTCATTTGGACT |
| 3277 | mir-019b-2-prec | 0.25 | GTGGCTGTGCAAATCCATGCAAAACTGATTGTGATAATGT |
| 3278 | mir-213-precNo1 | 0.39 | AACATTCATTGCTGTCGGTGGGTTGAACTGTGTGGACAAG |
| 3279 | mir-033-prec | 0.29 | GTGGTGCATTGTAGTTGCATTGCATGTTCTGGTGGTACCC |
| 3280 | mir-092-prec-13 = 092-1No2 | 0.3 | TCTGTATGGTATTGCACTTGTCCCGGCCTGTTGAGTTTGG |
| 3281 | mir-181b-precNo1 | 0.36 | TGAGGTTGCTTCAGTGAACATTCAACGCTGTCGGTGAGTT |
| 3282 | mir-128b-precNo1 | 0.46 | TCACAGTGAACCGGTCTCTTTCCCTACTGTGTCACACTCC |
| 3283 | mir-526a-2No2 | 0.29 | GAAAAGAACATGCATCCTTTCAGAGGGTTACTCTTTGAGA |
| 3284 | MPR95 left | 0.25 | TTGTTGGACACTCTTTCCCTGTTGCACTACTGTGGGCCTC |
| 3285 | HPR220 right | 0.27 | GAGCATCAGTATGTAGTGCAATCAGTCAGGAGAAAATGAG |
| 3286 | mir-133a-1 | 0.35 | CCTCTTCAATGGATTTGGTCCCCTTCAACCAGCTGTAGCT |
| 3287 | mir-148aNo1 | 0.3 | TGAGTATGATAGAAGTCAGTGCACTACAGAACTTTGTCTC |
| 3288 | mir-142-prec | 0.4 | CCCATAAAGTAGAAAGCACTACTAACAGCACTGGAGGGTG |
| 3289 | HPR169 right | 0.26 | GTTTCTTTCTCACGGTAACTGGCAGCCTCGTTGTGGGCTG |
| 3290 | mir-223-prec | 0.38 | GAGTGTCAGTTTGTCAAATACCCCAAGTGCGGCACATGCT |
| 3291 | mir-018-prec | 0.27 | TAAGGTGCATCTAGTGCAGATAGTGAAGTAGATTAGCATC |
| 3292 | mir-020-prec | 0.25 | TAAAGTGCTTATAGTGCAGGTAGTGTTTAGTTATCTACTG |
| 3293 | mir-484 | 0.27 | GTCAGGCTCAGTCCCCTCCCGATAAACCCCTAAATAGGGA |

TABLE 133
Tamoxifen microRNA biomarkers.

| SEQ | | | |
|---|---|---|---|
| ID | | | |
| NO | Medianprobe | Corr | Sequence |
| 3294 | mir-092-prec-X = 092-2 | 0.31 | GTTCTATATAAAGTATTGCACTTGTCCCGGCCTGTGGAAG |
| 3295 | Hcd547 left | 0.27 | AAAATCAGCTTTAATTAATTTGAGTGCCAGCTCTGTGTAT |
| 3296 | Hcd257 left | 0.27 | CTTCTTGTATAAGCACTGTGCTAAAATTGCAGACACTAGG |
| 3297 | mir-148-prec | 0.27 | TGAGTATGATAGAAGTCAGTGCACTACAGAACTTTGTCTC |
| 3298 | HUMTRS | 0.25 | TCTAGCGACAGAGTGGTTCAATTCCACCTTTCGGGCGCCA |
| 3299 | mir-033-prec | 0.27 | GTGGTGCATTGTAGTTGCATTGCATGTTCTGGTGGTACCC |
| 3300 | mir-092-prec-13 = 092-1No2 | 0.25 | TCTGTATGGTATTGCACTTGTCCCGGCCTGTTGAGTTTGG |
| 3301 | mir-375 | 0.46 | TTTTGTTCGTTCGGCTCGCGTGAGGCAGGGGCGGCCTCTC |
| 3302 | mir-095-prec-4 | 0.28 | CGTTACATTCAACGGGTATTTATTGAGCACCCACTCTGTG |
| 3303 | mir-025-prec | 0.35 | ACGCTGCCCTGGGCATTGCACTTGTCTCGGTCTGACAGTG |
| 3304 | mir-202-prec | 0.34 | GATCTGGCCTAAAGAGGTATAGGGCATGGGAAGATGGAGC |
| 3305 | mir-007-1-prec | 0.26 | TGTTGGCCTAGTTCTGTGTGGAAGACTAGTGATTTTGTTG |
| 3306 | mir-093-prec-7.1 = 093-1 | 0.44 | CCAAAGTGCTGTTCGTGCAGGTAGTGTGATTACCCAACCT |
| 3307 | mir-106-prec-X | 0.31 | CCTTGGCCATGTAAAAGTGCTTACAGTGCAGGTAGCTTTT |
| 3308 | mir-142-prec | 0.25 | CCCATAAAGTAGAAAGCACTACTAACAGCACTGGAGGGTG |
| 3309 | mir-223-prec | 0.25 | GAGTGTCAGTTTGTCAAATACCCCAAGTGCGGCACATGCT |
| 3310 | mir-018-prec | 0.26 | TAAGGTGCATCTAGTGCAGATAGTGAAGTAGATTAGCATC |

TABLE 134
Floxuridine microRNA biomarkers.

| | | | |
|---|---|---|---|
| SEQ | | | |
| ID | | | |
| NO | Medianprobe | Corr | Sequence |

| | | | |
|---|---|---|---|
| 3311 | HUMTRF | 0.27 | GATCTAAAGGTCCCTGGTTCGATCCCGGGTTTCGGCACCA |
| 3312 | HUMTRN | 0.27 | CAATCGGTTAGCGCGTTCGGCTGTTAACCGAAAGGTTGGT |
| 3313 | mir-124a-1-prec1 | 0.31 | ATACAATTAAGGCACGCGGTGAATGCCAAGAATGGGGCTG |
| 3314 | mir-150-prec | 0.33 | CTCCCCATGGCCCTGTCTCCCAACCCTTGTACCAGTGCTG |
| 3315 | Hcd923 left | 0.26 | TGGGAACCTTGTTAAAATGCAGATTCTGATTCTCAGGTCT |
| 3316 | HPR181 left | 0.28 | GAAGAAACATCTCAAATCATGCTGACAGCATTTTCACTAT |
| 3317 | Hcd569 right | 0.26 | TTATTGCTTGAATGAGTTTCAGGGTATTGGCCTTCATAAA |
| 3318 | mir-199a-2-prec | 0.25 | TCGCCCCAGTGTTCAGACTACCTGTTCAGGACAATGCCGT |
| 3319 | Hcd754 left | 0.28 | TCCTCCTCCTCCTTTTCGTTCCGGCTCCCTGGCTGGCTCC |
| 3320 | mir-4323p | 0.3 | CCTTACGTGGGCCACTGGATGGCTCCTCCATGTCTTGGAG |

TABLE 135
Irinotecan microRNA biomarkers.

| SEQ | | | |
|---|---|---|---|
| ID | | | |
| NO | Medianprobe | Corr | Sequence |
| 3321 | HUMTRF | 0.27 | GATCTAAAGGTCCCTGGTTCGATCCCGGGTTTCGGCACCA |
| 3322 | mir-380-5p | 0.27 | AGGTACCTGAAAAGATGGTTGACCATAGAACATGCGCTAT |
| 3323 | mir-342No1 | 0.25 | GTCTCACACAGAAATCGCACCCGTCACCTTGGCCTACTTA |
| 3324 | mir-142-prec | 0.35 | CCCATAAAGTAGAAAGCACTACTAACAGCACTGGAGGGTG |
| 3325 | Hcd200 right | 0.25 | CAATTAGCCAATTGTGGGTATAATTAGCTGCATGTAGAAT |

TABLE 136
Satraplatin microRNA biomarkers.

| | | | |
|---|---|---|---|
| SEQ | | | |
| ID | | | |
| NO | Medianprobe | Corr | Sequence |

| | | | |
|---|---|---|---|
| 3326 | Hcd289 left | 0.31 | TTCCTCTCAGAGCATGTTGTCATAGAAGTAAATGAAAAGG |
| 3327 | Hcd939 right | 0.25 | CTCTCCTGCACATAATGAGGTCTGATTTACTGTGATCATT |
| 3328 | Hcd330 right | 0.28 | ATTAATGGTAATTATGTGCGTAAATCCCCATGCTCTCAAT |
| 3329 | HPR76 right | 0.25 | GAGCCGTTTAAATTTAGCGCTTTGGGCTGCCTGGAGCGAG |
| 3330 | Hcd111 left | 0.29 | GCAGGGGATTTGAGGGGTGGTTGTGTGATTTGTACAGCTG |
| 3331 | Hcd976 right | 0.36 | CTTCTCAGAGTTGGAGATGAAAGAAAGAGAAGGTGGCCAC |
| 3332 | mir-15aNo1 | 0.29 | CCTTGGAGTAAAGTAGCAGCACATAATGGTTTGTGGATTT |
| 3333 | mir-001b-1-prec1 | 0.26 | AATGCTATGGAATGTAAAGAAGTATGTATTTTTGGTAGGC |
| 3334 | mir-450-1 | 0.36 | AACGATACTAAACTGTTTTTGCGATGTGTTCCTAATATGC |
| 3335 | mir-200bNo2 | 0.3 | CCAGCTCGGGCAGCCGTGGCCATCTTACTGGGCAGCATTG |
| 3336 | Hcd578 right | 0.3 | AATGATTGTAGAGGGGCGGGGCATGAAGAGTGCCGTTCTG |
| 3337 | mir-200a-prec | 0.28 | GTCTCTAATACTGCCTGGTAATGATGACGGCGGAGCCCTG |

The application's sequence listing, which the Patent Office published only in electronic form, follows.

SEQUENCE LISTING (3337 sequences)

SEQ ID NO: 1 - DNA, 25 bp, Homo sapiens
tcctgtacttgtcctcagcttgggc

SEQ ID NO: 2 - DNA, 25 bp, Homo sapiens
gccccactggacaacactgattcct

SEQ ID NO: 3 - DNA, 25 bp, Homo sapiens
tgcctgctcctgtacttgtcctcag

SEQ ID NO: 4 - DNA, 25 bp, Homo sapiens
aaatgtttccttgtgcctgctcctg

SEQ ID NO: 5 - DNA, 25 bp, Homo sapiens
tcctgtacttgtcctcagcttgggc

SEQ ID NO: 6 - DNA, 25 bp, Homo sapiens
aagcctatacgtttctgtggagtaa

SEQ ID NO: 7 - DNA, 25 bp, Homo sapiens
acttgtcctcagcttgggcttcttc

SEQ ID NO: 8 - DNA, 25 bp, Homo sapiens
tcctgtacttgtcctcagcttgggc

SEQ ID NO: 9 - DNA, 25 bp, Homo sapiens
tggaccccactggctgagaatctgg

SEQ ID NO: 10 - DNA, 25 bp, Homo sapiens
ttggacatctctagtgtagctgcca

SEQ ID NO: 11 - DNA, 25 bp, Homo sapiens
cacccagctggtcctgtggatggga

SEQ ID NO: 12 - DNA, 25 bp, Homo sapiens
tgcctgctcctgtacttgtcctcag

SEQ ID NO: 13 - DNA, 25 bp, Homo sapiens
acttgtcctcagcttgggcttcttc

SEQ ID NO: 14 - DNA, 25 bp, Homo sapiens
cacccagctggtcctgtggatggga

SEQ ID NO: 15 - DNA, 25 bp, Homo sapiens
ttggacatctctagtgtagctgcca

SEQ ID NO: 16 - DNA, 25 bp, Homo sapiens
tcctccatcacctgaaacactggac

SEQ ID NO: 17 - DNA, 25 bp, Homo sapiens
tgcctgctcctgtacttgtcctcag

SEQ ID NO: 18 - DNA, 25 bp, Homo sapiens
aagcctatacgtttctgtggagtaa

SEQ ID NO: 19 - DNA, 25 bp, Homo sapiens
ttggacatctctagtgtagctgcca

SEQ ID NO: 20 - DNA, 25 bp, Homo sapiens
tcctccatcacctgaaacactggac

SEQ ID NO: 21 - DNA, 25 bp, Homo sapiens
tcctccatcacctgaaacactggac

SEQ ID NO: 22 - DNA, 25 bp, Homo sapiens
cacccagctggtcctgtggatggga

SEQ ID NO: 23 - DNA, 25 bp, Homo sapiens
cacccagctggtcctgtggatggga

SEQ ID NO: 24 - DNA, 25 bp, Homo sapiens
tccttgtgcctgctcctgtacttgt

SEQ ID NO: 25 - DNA, 25 bp, Homo sapiens
cacccagctggtcctgtggatggga

SEQ ID NO: 26 - DNA, 25 bp, Homo sapiens
tgcctgctcctgtacttgtcctcag

SEQ ID NO: 27 - DNA, 25 bp, Homo sapiens
aaatgtttccttgtgcctgctcctg

SEQ ID NO: 28 - DNA, 25 bp, Homo sapiens
aagcctatacgtttctgtggagtaa

SEQ ID NO: 29 - DNA, 25 bp, Homo sapiens
tccttgtgcctgctcctgtacttgt

SEQ ID NO: 30 - DNA, 25 bp, Homo sapiens
gccccactggacaacactgattcct

SEQ ID NO: 31 - DNA, 25 bp, Homo sapiens
aagcctatacgtttctgtggagtaa

SEQ ID NO: 32 - DNA, 25 bp, Homo sapiens
cacccagctggtcctgtggatggga

SEQ ID NO: 33 - DNA, 25 bp, Homo sapiens
tggaccccactggctgagaatctgg

SEQ ID NO: 34 - DNA, 25 bp, Homo sapiens
tccttgtgcctgctcctgtacttgt

SEQ ID NO: 35 - DNA, 25 bp, Homo sapiens
gccccactggacaacactgattcct

SEQ ID NO: 36 - DNA, 25 bp, Homo sapiens
aagcctatacgtttctgtggagtaa

SEQ ID NO: 37 - DNA, 25 bp, Homo sapiens
tcctccatcacctgaaacactggac

SEQ ID NO: 38 - DNA, 25 bp, Homo sapiens
aagcctatacgtttctgtggagtaa

SEQ ID NO: 39 - DNA, 25 bp, Homo sapiens
tgcctgctcctgtacttgtcctcag

SEQ ID NO: 40 - DNA, 25 bp, Homo sapiens
gccccactggacaacactgattcct

SEQ ID NO: 41 - DNA, 25 bp, Homo sapiens
acttgtcctcagcttgggcttcttc

SEQ ID NO: 42 - DNA, 25 bp, Homo sapiens
tggaccccactggctgagaatctgg

SEQ ID NO: 43 - DNA, 25 bp, Homo sapiens
tcctccatcacctgaaacactggac

SEQ ID NO: 44 - DNA, 25 bp, Homo sapiens
tgcctgctcctgtacttgtcctcag

SEQ ID NO: 45 - DNA, 25 bp, Homo sapiens
cacccagctggtcctgtggatggga

SEQ ID NO: 46 - DNA, 25 bp, Homo sapiens
tggaccccactggctgagaatctgg

SEQ ID NO: 47 - DNA, 25 bp, Homo sapiens
aagcctatacgtttctgtggagtaa

SEQ ID NO: 48 - DNA, 25 bp, Homo sapiens
ttggacatctctagtgtagctgcca

SEQ ID NO: 49 - DNA, 25 bp, Homo sapiens
aaatgtttccttgtgcctgctcctg

SEQ ID NO: 50 - DNA, 25 bp, Homo sapiens
tgcctgctcctgtacttgtcctcag

SEQ ID NO: 51 - DNA, 25 bp, Homo sapiens
cacccagctggtcctgtggatggga

SEQ ID NO: 52 - DNA, 25 bp, Homo sapiens
tggaccccactggctgagaatctgg

SEQ ID NO: 53 - DNA, 25 bp, Homo sapiens
gccccactggacaacactgattcct

SEQ ID NO: 54 - DNA, 25 bp, Homo sapiens
tcctccatcacctgaaacactggac

SEQ ID NO: 55 - DNA, 25 bp, Homo sapiens
tgcctgctcctgtacttgtcctcag

SEQ ID NO: 56 - DNA, 25 bp, Homo sapiens
acttgtcctcagcttgggcttcttc

SEQ ID NO: 57 - DNA, 25 bp, Homo sapiens
tcctccatcacctgaaacactggac

SEQ ID NO: 58 - DNA, 25 bp, Homo sapiens
tggaccccactggctgagaatctgg

SEQ ID NO: 59 - DNA, 25 bp, Homo sapiens
tggaccccactggctgagaatctgg

SEQ ID NO: 60 - DNA, 25 bp, Homo sapiens
acttgtcctcagcttgggcttcttc

SEQ ID NO: 61 - DNA, 25 bp, Homo sapiens
tgcctgctcctgtacttgtcctcag

SEQ ID NO: 62 - DNA, 25 bp, Homo sapiens
acttgtcctcagcttgggcttcttc

SEQ ID NO: 63 - DNA, 25 bp, Homo sapiens
tgcctgctcctgtacttgtcctcag

SEQ ID NO: 64 - DNA, 25 bp, Homo sapiens
ttggacatctctagtgtagctgcca

SEQ ID NO: 65 - DNA, 25 bp, Homo sapiens
aaatgtttccttgtgcctgctcctg

SEQ ID NO: 66 - DNA, 25 bp, Homo sapiens
tggaccccactggctgagaatctgg

SEQ ID NO: 67 - DNA, 25 bp, Homo sapiens
tcctgtacttgtcctcagcttgggc

SEQ ID NO: 68 - DNA, 25 bp, Homo sapiens
aagcctatacgtttctgtggagtaa

SEQ ID NO: 69 - DNA, 25 bp, Homo sapiens
acttgtcctcagcttgggcttcttc

SEQ ID NO: 70 - DNA, 25 bp, Homo sapiens
ttggacatctctagtgtagctgcca

SEQ ID NO: 71 - DNA, 25 bp, Homo sapiens
tgcctgctcctgtacttgtcctcag

SEQ ID NO: 72 - DNA, 25 bp, Homo sapiens
tcctgtacttgtcctcagcttgggc

SEQ ID NO: 73 - DNA, 25 bp, Homo sapiens
aaatgtttccttgtgcctgctcctg

SEQ ID NO: 74 - DNA, 25 bp, Homo sapiens
acttgtcctcagcttgggcttcttc

SEQ ID NO: 75 - DNA, 25 bp, Homo sapiens
tccttgtgcctgctcctgtacttgt

SEQ ID NO: 76 - DNA, 25 bp, Homo sapiens
tcctccatcacctgaaacactggac

SEQ ID NO: 77 - DNA, 25 bp, Homo sapiens
tgcctgctcctgtacttgtcctcag

SEQ ID NO: 78 - DNA, 25 bp, Homo sapiens
acttgtcctcagcttgggcttcttc

SEQ ID NO: 79 - DNA, 25 bp, Homo sapiens
cacccagctggtcctgtggatggga

SEQ ID NO: 80 - DNA, 25 bp, Homo sapiens
ttggacatctctagtgtagctgcca

SEQ ID NO: 81 - DNA, 25 bp, Homo sapiens
cacccagctggtcctgtggatggga

SEQ ID NO: 82 - DNA, 25 bp, Homo sapiens
tcctgtacttgtcctcagcttgggc

SEQ ID NO: 83 - DNA, 25 bp, Homo sapiens
aagcctatacgtttctgtggagtaa

SEQ ID NO: 84 - DNA, 25 bp, Homo sapiens
tgcctgctcctgtacttgtcctcag

SEQ ID NO: 85 - DNA, 25 bp, Homo sapiens
aagcctatacgtttctgtggagtaa

SEQ ID NO: 86 - DNA, 25 bp, Homo sapiens
tcctgtacttgtcctcagcttgggc

SEQ ID NO: 87 - DNA, 25 bp, Homo sapiens
aaatgtttccttgtgcctgctcctg

SEQ ID NO: 88 - DNA, 25 bp, Homo sapiens
tccttgtgcctgctcctgtacttgt

SEQ ID NO: 89 - DNA, 25 bp, Homo sapiens
cacccagctggtcctgtggatggga

SEQ ID NO: 90 - DNA, 25 bp, Homo sapiens
aagcctatacgtttctgtggagtaa

SEQ ID NO: 91 - DNA, 25 bp, Homo sapiens
tcctgtacttgtcctcagcttgggc

SEQ ID NO: 92 - DNA, 25 bp, Homo sapiens
tccttgtgcctgctcctgtacttgt

SEQ ID NO: 93 - DNA, 25 bp, Homo sapiens
aagcctatacgtttctgtggagtaa

SEQ ID NO: 94 - DNA, 25 bp, Homo sapiens
gccccactggacaacactgattcct

SEQ ID NO: 95 - DNA, 25 bp, Homo sapiens
acttgtcctcagcttgggcttcttc

SEQ ID NO: 96 - DNA, 25 bp, Homo sapiens
tccttgtgcctgctcctgtacttgt

SEQ ID NO: 97 - DNA, 25 bp, Homo sapiens
acttgtcctcagcttgggcttcttc

SEQ ID NO: 98 - DNA, 25 bp, Homo sapiens
tggaccccactggctgagaatctgg

SEQ ID NO: 99 - DNA, 25 bp, Homo sapiens
aaatgtttccttgtgcctgctcctg

SEQ ID NO: 100 - DNA, 25 bp, Homo sapiens
tgcctgctcctgtacttgtcctcag

SEQ ID NO: 101 - DNA, 25 bp, Homo sapiens
tcctccatcacctgaaacactggac

SEQ ID NO: 102 - DNA, 25 bp, Homo sapiens
tgcctgctcctgtacttgtcctcag

SEQ ID NO: 103 - DNA, 25 bp, Homo sapiens
aaatgtttccttgtgcctgctcctg

SEQ ID NO: 104 - DNA, 25 bp, Homo sapiens
tcctccatcacctgaaacactggac

SEQ ID NO: 105 - DNA, 25 bp, Homo sapiens
ttggacatctctagtgtagctgcca

SEQ ID NO: 106 - DNA, 25 bp, Homo sapiens
tcctgtacttgtcctcagcttgggc

SEQ ID NO: 107 - DNA, 25 bp, Homo sapiens
gccccactggacaacactgattcct

SEQ ID NO: 108 - DNA, 25 bp, Homo sapiens
tggaccccactggctgagaatctgg

SEQ ID NO: 109 - DNA, 25 bp, Homo sapiens
aagcctatacgtttctgtggagtaa

SEQ ID NO: 110 - DNA, 25 bp, Homo sapiens
tccttgtgcctgctcctgtacttgt

SEQ ID NO: 111 - DNA, 25 bp, Homo sapiens
tgcctgctcctgtacttgtcctcag

SEQ ID NO: 112 - DNA, 25 bp, Homo sapiens
tcctccatcacctgaaacactggac

SEQ ID NO: 113 - DNA, 25 bp, Homo sapiens
tccttgtgcctgctcctgtacttgt

SEQ ID NO: 114 - DNA, 25 bp, Homo sapiens
tggaccccactggctgagaatctgg

SEQ ID NO: 115 - DNA, 25 bp, Homo sapiens
acttgtcctcagcttgggcttcttc

SEQ ID NO: 116 - DNA, 25 bp, Homo sapiens
ttggacatctctagtgtagctgcca

SEQ ID NO: 117 - DNA, 25 bp, Homo sapiens
aagcctatacgtttctgtggagtaa

SEQ ID NO: 118 - DNA, 25 bp, Homo sapiens
tcctccatcacctgaaacactggac

SEQ ID NO: 119 - DNA, 25 bp, Homo sapiens
aaatgtttccttgtgcctgctcctg

SEQ ID NO: 120 - DNA, 25 bp, Homo sapiens
cacccagctggtcctgtggatggga

SEQ ID NO: 121 - DNA, 25 bp, Homo sapiens
tccttgtgcctgctcctgtacttgt

SEQ ID NO: 122 - DNA, 25 bp, Homo sapiens
tcctccatcacctgaaacactggac

SEQ ID NO: 123 - DNA, 25 bp, Homo sapiens
tggaccccactggctgagaatctgg

SEQ ID NO: 124 - DNA, 25 bp, Homo sapiens
tgcctgctcctgtacttgtcctcag

SEQ ID NO: 125 - DNA, 25 bp, Homo sapiens
acttgtcctcagcttgggcttcttc

SEQ ID NO: 126 - DNA, 25 bp, Homo sapiens
ttggacatctctagtgtagctgcca

SEQ ID NO: 127 - DNA, 25 bp, Homo sapiens
aagcctatacgtttctgtggagtaa

SEQ ID NO: 128 - DNA, 25 bp, Homo sapiens
aagcctatacgtttctgtggagtaa

SEQ ID NO: 129 - DNA, 25 bp, Homo sapiens
tcctccatcacctgaaacactggac

SEQ ID NO: 130 - DNA, 25 bp, Homo sapiens
tccttgtgcctgctcctgtacttgt

SEQ ID NO: 131 - DNA, 25 bp, Homo sapiens
acttgtcctcagcttgggcttcttc

SEQ ID NO: 132 - DNA, 25 bp, Homo sapiens
tcctgtacttgtcctcagcttgggc

SEQ ID NO: 133 - DNA, 25 bp, Homo sapiens
tgcctgctcctgtacttgtcctcag

SEQ ID NO: 134 - DNA, 25 bp, Homo sapiens
aagcctatacgtttctgtggagtaa

SEQ ID NO: 135 - DNA, 25 bp, Homo sapiens
cacccagctggtcctgtggatggga

SEQ ID NO: 136 - DNA, 25 bp, Homo sapiens
tcctgtacttgtcctcagcttgggc

SEQ ID NO: 137 - DNA, 25 bp, Homo sapiens
tcctccatcacctgaaacactggac

SEQ ID NO: 138 - DNA, 25 bp, Homo sapiens
cacccagctggtcctgtggatggga

SEQ ID NO: 139 - DNA, 25 bp, Homo sapiens
aaatgtttccttgtgcctgctcctg

SEQ ID NO: 140 - DNA, 25 bp, Homo sapiens
ttggacatctctagtgtagctgcca

SEQ ID NO: 141 - DNA, 25 bp, Homo sapiens
tccttgtgcctgctcctgtacttgt

SEQ ID NO: 142 - DNA, 25 bp, Homo sapiens
aaatgtttccttgtgcctgctcctg

SEQ ID NO: 143 - DNA, 25 bp, Homo sapiens
tgcctgctcctgtacttgtcctcag

SEQ ID NO: 144 - DNA, 25 bp, Homo sapiens
aaatgtttccttgtgcctgctcctg

SEQ ID NO: 145 - DNA, 25 bp, Homo sapiens
aagcctatacgtttctgtggagtaa

SEQ ID NO: 146 - DNA, 25 bp, Homo sapiens
tgcctgctcctgtacttgtcctcag

SEQ ID NO: 147 - DNA, 25 bp, Homo sapiens
aagcctatacgtttctgtggagtaa

SEQ ID NO: 148 - DNA, 25 bp, Homo sapiens
tccttgtgcctgctcctgtacttgt

SEQ ID NO: 149 - DNA, 25 bp, Homo sapiens
tccttgtgcctgctcctgtacttgt

SEQ ID NO: 150 - DNA, 25 bp, Homo sapiens
cacccagctggtcctgtggatggga

SEQ ID NO: 151 - DNA, 25 bp, Homo sapiens
aagcctatacgtttctgtggagtaa

SEQ ID NO: 152 - DNA, 25 bp, Homo sapiens
aagcctatacgtttctgtggagtaa

SEQ ID NO: 153 - DNA, 25 bp, Homo sapiens
tccttgtgcctgctcctgtacttgt

SEQ ID NO: 154 - DNA, 25 bp, Homo sapiens
aaatgtttccttgtgcctgctcctg

SEQ ID NO: 155 - DNA, 25 bp, Homo sapiens
acttgtcctcagcttgggcttcttc

SEQ ID NO: 156 - DNA, 25 bp, Homo sapiens
tgcctgctcctgtacttgtcctcag

SEQ ID NO: 157 - DNA, 25 bp, Homo sapiens
aaatgtttccttgtgcctgctcctg

SEQ ID NO: 158 - DNA, 25 bp, Homo sapiens
tccttgtgcctgctcctgtacttgt

SEQ ID NO: 159 - DNA, 25 bp, Homo sapiens
ttggacatctctagtgtagctgcca

SEQ ID NO: 160 - DNA, 25 bp, Homo sapiens
ttggacatctctagtgtagctgcca

SEQ ID NO: 161 - DNA, 25 bp, Homo sapiens
gccccactggacaacactgattcct

SEQ ID NO: 162 - DNA, 25 bp, Homo sapiens
tgcctgctcctgtacttgtcctcag

SEQ ID NO: 163 - DNA, 25 bp, Homo sapiens
gccccactggacaacactgattcct

SEQ ID NO: 164 - DNA, 25 bp, Homo sapiens
tccttgtgcctgctcctgtacttgt

SEQ ID NO: 165 - DNA, 25 bp, Homo sapiens
tcctccatcacctgaaacactggac

SEQ ID NO: 166 - DNA, 25 bp, Homo sapiens
tccttgtgcctgctcctgtacttgt

SEQ ID NO: 167 - DNA, 25 bp, Homo sapiens
tccttgtgcctgctcctgtacttgt

SEQ ID NO: 168 - DNA, 25 bp, Homo sapiens
tcctgtacttgtcctcagcttgggc

SEQ ID NO: 169 - DNA, 25 bp, Homo sapiens
aaatgtttccttgtgcctgctcctg

SEQ ID NO: 170 - DNA, 25 bp, Homo sapiens
tcctccatcacctgaaacactggac

SEQ ID NO: 171 - DNA, 25 bp, Homo sapiens
tccttgtgcctgctcctgtacttgt

SEQ ID NO: 172 - DNA, 25 bp, Homo sapiens
aagcctatacgtttctgtggagtaa

SEQ ID NO: 173 - DNA, 25 bp, Homo sapiens
tcctccatcacctgaaacactggac

SEQ ID NO: 174 - DNA, 25 bp, Homo sapiens
tccttgtgcctgctcctgtacttgt

SEQ ID NO: 175 - DNA, 25 bp, Homo sapiens
tcctgtacttgtcctcagcttgggc

SEQ ID NO: 176 - DNA, 25 bp, Homo sapiens
aagcctatacgtttctgtggagtaa

SEQ ID NO: 177 - DNA, 25 bp, Homo sapiens
gccccactggacaacactgattcct

SEQ ID NO: 178 - DNA, 25 bp, Homo sapiens
tgcctgctcctgtacttgtcctcag

SEQ ID NO: 179 - DNA, 25 bp, Homo sapiens
tccttgtgcctgctcctgtacttgt

SEQ ID NO: 180 - DNA, 25 bp, Homo sapiens
tcctgtacttgtcctcagcttgggc

SEQ ID NO: 181 - DNA, 25 bp, Homo sapiens
tggaccccactggctgagaatctgg

SEQ ID NO: 182 - DNA, 25 bp, Homo sapiens
aaatgtttccttgtgcctgctcctg

SEQ ID NO: 183 - DNA, 25 bp, Homo sapiens
aagcctatacgtttctgtggagtaa

SEQ ID NO: 184 - DNA, 25 bp, Homo sapiens
aaatgtttccttgtgcctgctcctg

SEQ ID NO: 185 - DNA, 25 bp, Homo sapiens
tcctgtacttgtcctcagcttgggc

SEQ ID NO: 186 - DNA, 25 bp, Homo sapiens
tgcctgctcctgtacttgtcctcag

SEQ ID NO: 187 - DNA, 25 bp, Homo sapiens
gccccactggacaacactgattcct

SEQ ID NO: 188 - DNA, 25 bp, Homo sapiens
acttgtcctcagcttgggcttcttc

SEQ ID NO: 189 - DNA, 25 bp, Homo sapiens
tccttgtgcctgctcctgtacttgt

SEQ ID NO: 190 - DNA, 25 bp, Homo sapiens
acttgtcctcagcttgggcttcttc

SEQ ID NO: 191 - DNA, 25 bp, Homo sapiens
tcctccatcacctgaaacactggac

SEQ ID NO: 192 - DNA, 25 bp, Homo sapiens
tcctccatcacctgaaacactggac

SEQ ID NO: 193 - DNA, 25 bp, Homo sapiens
tccttgtgcctgctcctgtacttgt

SEQ ID NO: 194 - DNA, 25 bp, Homo sapiens
acttgtcctcagcttgggcttcttc

SEQ ID NO: 195 - DNA, 25 bp, Homo sapiens
tgcctgctcctgtacttgtcctcag

SEQ ID NO: 196 - DNA, 25 bp, Homo sapiens
gccccactggacaacactgattcct

SEQ ID NO: 197 - DNA, 25 bp, Homo sapiens
aaatgtttccttgtgcctgctcctg

SEQ ID NO: 198 - DNA, 25 bp, Homo sapiens
aaatgtttccttgtgcctgctcctg

SEQ ID NO: 199 - DNA, 25 bp, Homo sapiens
aaatgtttccttgtgcctgctcctg

SEQ ID NO: 200 - DNA, 25 bp, Homo sapiens
aaatgtttccttgtgcctgctcctg

SEQ ID NO: 201 - DNA, 25 bp, Homo sapiens
acttgtcctcagcttgggcttcttc

SEQ ID NO: 202 - DNA, 25 bp, Homo sapiens
cacccagctggtcctgtggatggga

SEQ ID NO: 203 - DNA, 25 bp, Homo sapiens
tcctccatcacctgaaacactggac

SEQ ID NO: 204 - DNA, 25 bp, Homo sapiens
tgcctgctcctgtacttgtcctcag

SEQ ID NO: 205 - DNA, 25 bp, Homo sapiens
tggaccccactggctgagaatctgg

SEQ ID NO: 206 - DNA, 25 bp, Homo sapiens
tgcctgctcctgtacttgtcctcag

SEQ ID NO: 207 - DNA, 25 bp, Homo sapiens
tgcctgctcctgtacttgtcctcag

SEQ ID NO: 208 - DNA, 25 bp, Homo sapiens
ttggacatctctagtgtagctgcca

SEQ ID NO: 209 - DNA, 25 bp, Homo sapiens
tcctccatcacctgaaacactggac

SEQ ID NO: 210 - DNA, 25 bp, Homo sapiens
tcctccatcacctgaaacactggac

SEQ ID NO: 211 - DNA, 25 bp, Homo sapiens
tggaccccactggctgagaatctgg

SEQ ID NO: 212 - DNA, 25 bp, Homo sapiens
cacccagctggtcctgtggatggga

SEQ ID NO: 213 - DNA, 25 bp, Homo sapiens
cacccagctggtcctgtggatggga

SEQ ID NO: 214 - DNA, 25 bp, Homo sapiens
cacccagctggtcctgtggatggga

SEQ ID NO: 215 - DNA, 25 bp, Homo sapiens
tcctgtacttgtcctcagcttgggc

SEQ ID NO: 216 - DNA, 25 bp, Homo sapiens
tgcctgctcctgtacttgtcctcag

SEQ ID NO: 217 - DNA, 25 bp, Homo sapiens
aagcctatacgtttctgtggagtaa

SEQ ID NO: 218 - DNA, 25 bp, Homo sapiens
aagcctatacgtttctgtggagtaa

SEQ ID NO: 219 - DNA, 25 bp, Homo sapiens
tggaccccactggctgagaatctgg

SEQ ID NO: 220 - DNA, 25 bp, Homo sapiens
tggaccccactggctgagaatctgg

SEQ ID NO: 221 - DNA, 25 bp, Homo sapiens
gccccactggacaacactgattcct

SEQ ID NO: 222 - DNA, 25 bp, Homo sapiens
ttggacatctctagtgtagctgcca

SEQ ID NO: 223 - DNA, 25 bp, Homo sapiens
acttgtcctcagcttgggcttcttc

SEQ ID NO: 224 - DNA, 25 bp, Homo sapiens
gccccactggacaacactgattcct

SEQ ID NO: 225 - DNA, 25 bp, Homo sapiens
tcctgtacttgtcctcagcttgggc

SEQ ID NO: 226 - DNA, 25 bp, Homo sapiens
gccccactggacaacactgattcct

SEQ ID NO: 227 - DNA, 25 bp, Homo sapiens
tgcctgctcctgtacttgtcctcag

SEQ ID NO: 228 - DNA, 25 bp, Homo sapiens
aagcctatacgtttctgtggagtaa

SEQ ID NO: 229 - DNA, 25 bp, Homo sapiens
aaatgtttccttgtgcctgctcctg

SEQ ID NO: 230 - DNA, 25 bp, Homo sapiens
aaatgtttccttgtgcctgctcctg

SEQ ID NO: 231 - DNA, 25 bp, Homo sapiens
tggaccccactggctgagaatctgg

SEQ ID NO: 232 - DNA, 25 bp, Homo sapiens
gccccactggacaacactgattcct

SEQ ID NO: 233 - DNA, 25 bp, Homo sapiens
tcctccatcacctgaaacactggac

SEQ ID NO: 234 - DNA, 25 bp, Homo sapiens
atatatggacctagcttgaggcaat

SEQ ID NO: 235 - DNA, 25 bp, Homo sapiens
aagcctatacgtttctgtggagtaa

SEQ ID NO: 236 - DNA, 25 bp, Homo sapiens
cacccagctggtcctgtggatggga

SEQ ID NO: 237 - DNA, 25 bp, Homo sapiens
tcctccatcacctgaaacactggac

SEQ ID NO: 238 - DNA, 25 bp, Homo sapiens
tcctgtacttgtcctcagcttgggc

SEQ ID NO: 239 - DNA, 25 bp, Homo sapiens
tccttgtgcctgctcctgtacttgt

SEQ ID NO: 240 - DNA, 25 bp, Homo sapiens
gccccactggacaacactgattcct

SEQ ID NO: 241 - DNA, 25 bp, Homo sapiens
tgcctgctcctgtacttgtcctcag

SEQ ID NO: 242 - DNA, 25 bp, Homo sapiens
acttgtcctcagcttgggcttcttc

SEQ ID NO: 243 - DNA, 25 bp, Homo sapiens
tccttgtgcctgctcctgtacttgt

SEQ ID NO: 244 - DNA, 25 bp, Homo sapiens
cacccagctggtcctgtggatggga

SEQ ID NO: 245 - DNA, 25 bp, Homo sapiens
aagcctatacgtttctgtggagtaa

SEQ ID NO: 246 - DNA, 25 bp, Homo sapiens
aaatgtttccttgtgcctgctcctg

SEQ ID NO: 247 - DNA, 25 bp, Homo sapiens
cacccagctggtcctgtggatggga

SEQ ID NO: 248 - DNA, 25 bp, Homo sapiens
aagcctatacgtttctgtggagtaa

SEQ ID NO: 249 - DNA, 25 bp, Homo sapiens
tggaccccactggctgagaatctgg

SEQ ID NO: 250 - DNA, 25 bp, Homo sapiens
tcctgtacttgtcctcagcttgggc

SEQ ID NO: 251 - DNA, 25 bp, Homo sapiens
gccccactggacaacactgattcct

SEQ ID NO: 252 - DNA, 25 bp, Homo sapiens
ttggacatctctagtgtagctgcca

SEQ ID NO: 253 - DNA, 25 bp, Homo sapiens
tccttgtgcctgctcctgtacttgt

SEQ ID NO: 254 - DNA, 25 bp, Homo sapiens
tgcctgctcctgtacttgtcctcag

SEQ ID NO: 255 - DNA, 25 bp, Homo sapiens
tccttgtgcctgctcctgtacttgt

SEQ ID NO: 256 - DNA, 25 bp, Homo sapiens
tcctccatcacctgaaacactggac

SEQ ID NO: 257 - DNA, 25 bp, Homo sapiens
cacccagctggtcctgtggatggga

SEQ ID NO: 258 - DNA, 25 bp, Homo sapiens
aagcctatacgtttctgtggagtaa

SEQ ID NO: 259 - DNA, 25 bp, Homo sapiens
tgcctgctcctgtacttgtcctcag

SEQ ID NO: 260 - DNA, 25 bp, Homo sapiens
cacccagctggtcctgtggatggga

SEQ ID NO: 261 - DNA, 25 bp, Homo sapiens
tcctgtacttgtcctcagcttgggc

SEQ ID NO: 262 - DNA, 25 bp, Homo sapiens
cacccagctggtcctgtggatggga

SEQ ID NO: 263 - DNA, 25 bp, Homo sapiens
gccccactggacaacactgattcct

SEQ ID NO: 264 - DNA, 25 bp, Homo sapiens
tggaccccactggctgagaatctgg

SEQ ID NO: 265 - DNA, 25 bp, Homo sapiens
acttgtcctcagcttgggcttcttc

SEQ ID NO: 266 - DNA, 25 bp, Homo sapiens
tggaccccactggctgagaatctgg

SEQ ID NO: 267 - DNA, 25 bp, Homo sapiens
aaatgtttccttgtgcctgctcctg

SEQ ID NO: 268 - DNA, 25 bp, Homo sapiens
tcctccatcacctgaaacactggac

SEQ ID NO: 269 - DNA, 25 bp, Homo sapiens
tccttgtgcctgctcctgtacttgt

SEQ ID NO: 270 - DNA, 25 bp, Homo sapiens
gccccactggacaacactgattcct

SEQ ID NO: 271 - DNA, 25 bp, Homo sapiens
tcctccatcacctgaaacactggac

SEQ ID NO: 272 - DNA, 25 bp, Homo sapiens
aaatgtttccttgtgcctgctcctg

SEQ ID NO: 273 - DNA, 25 bp, Homo sapiens
aagcctatacgtttctgtggagtaa

SEQ ID NO: 274 - DNA, 25 bp, Homo sapiens
gccccactggacaacactgattcct

SEQ ID NO: 275 - DNA, 25 bp, Homo sapiens
acttgtcctcagcttgggcttcttc

SEQ ID NO: 276 - DNA, 25 bp, Homo sapiens
acttgtcctcagcttgggcttcttc

SEQ ID NO: 277 - DNA, 25 bp, Homo sapiens
aagcctatacgtttctgtggagtaa

SEQ ID NO: 278 - DNA, 25 bp, Homo sapiens
tggaccccactggctgagaatctgg

SEQ ID NO: 279 - DNA, 25 bp, Homo sapiens
gccccactggacaacactgattcct

SEQ ID NO: 280 - DNA, 25 bp, Homo sapiens
cacccagctggtcctgtggatggga

SEQ ID NO: 281 - DNA, 25 bp, Homo sapiens
gccccactggacaacactgattcct

SEQ ID NO: 282 - DNA, 25 bp, Homo sapiens
tgcctgctcctgtacttgtcctcag

SEQ ID NO: 283 - DNA, 25 bp, Homo sapiens
gccccactggacaacactgattcct

SEQ ID NO: 284 - DNA, 25 bp, Homo sapiens
tcctccatcacctgaaacactggac

SEQ ID NO: 285 - DNA, 25 bp, Homo sapiens
tggaccccactggctgagaatctgg

SEQ ID NO: 286 - DNA, 25 bp, Homo sapiens
tccttgtgcctgctcctgtacttgt

SEQ ID NO: 287 - DNA, 25 bp, Homo sapiens
aaatgtttccttgtgcctgctcctg

SEQ ID NO: 288 - DNA, 25 bp, Homo sapiens
tggaccccactggctgagaatctgg

SEQ ID NO: 289 - DNA, 25 bp, Homo sapiens
tgcctgctcctgtacttgtcctcag

SEQ ID NO: 290 - DNA, 25 bp, Homo sapiens
tgcctgctcctgtacttgtcctcag

SEQ ID NO: 291 - DNA, 25 bp, Homo sapiens
aaatgtttccttgtgcctgctcctg

SEQ ID NO: 292 - DNA, 25 bp, Homo sapiens
tcctccatcacctgaaacactggac

SEQ ID NO: 293 - DNA, 25 bp, Homo sapiens
tcctgtacttgtcctcagcttgggc

SEQ ID NO: 294 - DNA, 25 bp, Homo sapiens
cacccagctggtcctgtggatggga

SEQ ID NO: 295 - DNA, 25 bp, Homo sapiens
tgcctgctcctgtacttgtcctcag

SEQ ID NO: 296 - DNA, 25 bp, Homo sapiens
tggaccccactggctgagaatctgg

SEQ ID NO: 297 - DNA, 25 bp, Homo sapiens
tcctgtacttgtcctcagcttgggc

SEQ ID NO: 298 - DNA, 25 bp, Homo sapiens
tcctccatcacctgaaacactggac

SEQ ID NO: 299 - DNA, 25 bp, Homo sapiens
ttggacatctctagtgtagctgcca

SEQ ID NO: 300 - DNA, 25 bp, Homo sapiens
aagcctatacgtttctgtggagtaa

SEQ ID NO: 301 - DNA, 25 bp, Homo sapiens
acttgtcctcagcttgggcttcttc

SEQ ID NO: 302 - DNA, 25 bp, Homo sapiens
tccttgtgcctgctcctgtacttgt

SEQ ID NO: 303 - DNA, 25 bp, Homo sapiens
tcctccatcacctgaaacactggac

SEQ ID NO: 304 - DNA, 25 bp, Homo sapiens
tcctgtacttgtcctcagcttgggc

SEQ ID NO: 305 - DNA, 25 bp, Homo sapiens
tcctgtacttgtcctcagcttgggc

SEQ ID NO: 306 - DNA, 25 bp, Homo sapiens
aagcctatacgtttctgtggagtaa

SEQ ID NO: 307 - DNA, 25 bp, Homo sapiens
aagcctatacgtttctgtggagtaa

SEQ ID NO: 308 - DNA, 25 bp, Homo sapiens
tggaccccactggctgagaatctgg

SEQ ID NO: 309 - DNA, 25 bp, Homo sapiens
tcctccatcacctgaaacactggac

SEQ ID NO: 310 - DNA, 25 bp, Homo sapiens
gccccactggacaacactgattcct

SEQ ID NO: 311 - DNA, 25 bp, Homo sapiens
acttgtcctcagcttgggcttcttc

SEQ ID NO: 312 - DNA, 25 bp, Homo sapiens
tcctgtacttgtcctcagcttgggc

SEQ ID NO: 313 - DNA, 25 bp, Homo sapiens
acttgtcctcagcttgggcttcttc

SEQ ID NO: 314 - DNA, 25 bp, Homo sapiens
tccttgtgcctgctcctgtacttgt

SEQ ID NO: 315 - DNA, 25 bp, Homo sapiens
tgcctgctcctgtacttgtcctcag

SEQ ID NO: 316 - DNA, 25 bp, Homo sapiens
aagcctatacgtttctgtggagtaa

SEQ ID NO: 317 - DNA, 25 bp, Homo sapiens
aagcctatacgtttctgtggagtaa

SEQ ID NO: 318 - DNA, 25 bp, Homo sapiens
acttgtcctcagcttgggcttcttc

SEQ ID NO: 319 - DNA, 25 bp, Homo sapiens
ttggacatctctagtgtagctgcca

SEQ ID NO: 320 - DNA, 25 bp, Homo sapiens
tgcctgctcctgtacttgtcctcag

SEQ ID NO: 321 - DNA, 25 bp, Homo sapiens
aaatgtttccttgtgcctgctcctg

SEQ ID NO: 322 - DNA, 25 bp, Homo sapiens
aagcctatacgtttctgtggagtaa

SEQ ID NO: 323 - DNA, 25 bp, Homo sapiens
cacccagctggtcctgtggatggga

SEQ ID NO: 324 - DNA, 25 bp, Homo sapiens
tcctgtacttgtcctcagcttgggc

SEQ ID NO: 325 - DNA, 25 bp, Homo sapiens
gccccactggacaacactgattcct

SEQ ID NO: 326 - DNA, 25 bp, Homo sapiens
tcctccatcacctgaaacactggac

SEQ ID NO: 327 - DNA, 25 bp, Homo sapiens
acttgtcctcagcttgggcttcttc

SEQ ID NO: 328 - DNA, 25 bp, Homo sapiens
ttggacatctctagtgtagctgcca

SEQ ID NO: 329 - DNA, 25 bp, Homo sapiens
aagcctatacgtttctgtggagtaa

SEQ ID NO: 330 - DNA, 25 bp, Homo sapiens
aagcctatacgtttctgtggagtaa

SEQ ID NO: 331 - DNA, 25 bp, Homo sapiens
aagcctatacgtttctgtggagtaa

SEQ ID NO: 332 - DNA, 25 bp, Homo sapiens
cacccagctggtcctgtggatggga

SEQ ID NO: 333 - DNA, 25 bp, Homo sapiens
cacccagctggtcctgtggatggga

SEQ ID NO: 334 - DNA, 25 bp, Homo sapiens
gccccactggacaacactgattcct

SEQ ID NO: 335 - DNA, 25 bp, Homo sapiens
acttgtcctcagcttgggcttcttc

SEQ ID NO: 336 - DNA, 25 bp, Homo sapiens
tccttgtgcctgctcctgtacttgt

SEQ ID NO: 337 - DNA, 25 bp, Homo sapiens
cacccagctggtcctgtggatggga

SEQ ID NO: 338 - DNA, 25 bp, Homo sapiens
tcctgtacttgtcctcagcttgggc

SEQ ID NO: 339 - DNA, 25 bp, Homo sapiens
tcctgtacttgtcctcagcttgggc

SEQ ID NO: 340 - DNA, 25 bp, Homo sapiens
tgcctgctcctgtacttgtcctcag

SEQ ID NO: 341 - DNA, 25 bp, Homo sapiens
tgcctgctcctgtacttgtcctcag

SEQ ID NO: 342 - DNA, 25 bp, Homo sapiens
tcctgtacttgtcctcagcttgggc

SEQ ID NO: 343 - DNA, 25 bp, Homo sapiens
cacccagctggtcctgtggatggga

SEQ ID NO: 344 - DNA, 25 bp, Homo sapiens
tgcctgctcctgtacttgtcctcag

SEQ ID NO: 345 - DNA, 25 bp, Homo sapiens
tcctgtacttgtcctcagcttgggc

SEQ ID NO: 346 - DNA, 25 bp, Homo sapiens
cacccagctggtcctgtggatggga

SEQ ID NO: 347 - DNA, 25 bp, Homo sapiens
tccttgtgcctgctcctgtacttgt

SEQ ID NO: 348 - DNA, 25 bp, Homo sapiens
aaatgtttccttgtgcctgctcctg

SEQ ID NO: 349 - DNA, 25 bp, Homo sapiens
gccccactggacaacactgattcct

SEQ ID NO: 350 - DNA, 25 bp, Homo sapiens
aagcctatacgtttctgtggagtaa

SEQ ID NO: 351 - DNA, 25 bp, Homo sapiens
acttgtcctcagcttgggcttcttc

SEQ ID NO: 352 - DNA, 25 bp, Homo sapiens
tccttgtgcctgctcctgtacttgt

SEQ ID NO: 353 - DNA, 25 bp, Homo sapiens
cacccagctggtcctgtggatggga

SEQ ID NO: 354 - DNA, 25 bp, Homo sapiens
tccttgtgcctgctcctgtacttgt

SEQ ID NO: 355 - DNA, 25 bp, Homo sapiens
aaatgtttccttgtgcctgctcctg

SEQ ID NO: 356 - DNA, 25 bp, Homo sapiens
aagcctatacgtttctgtggagtaa

SEQ ID NO: 357 - DNA, 25 bp, Homo sapiens
cacccagctggtcctgtggatggga

SEQ ID NO: 358 - DNA, 25 bp, Homo sapiens
tcctgtacttgtcctcagcttgggc

SEQ ID NO: 359 - DNA, 25 bp, Homo sapiens
tgcctgctcctgtacttgtcctcag

SEQ ID NO: 360 - DNA, 25 bp, Homo sapiens
ttggacatctctagtgtagctgcca

SEQ ID NO: 361 - DNA, 25 bp, Homo sapiens
tgcctgctcctgtacttgtcctcag

SEQ ID NO: 362 - DNA, 25 bp, Homo sapiens
aaatgtttccttgtgcctgctcctg

SEQ ID NO: 363 - DNA, 25 bp, Homo sapiens
tcctccatcacctgaaacactggac

SEQ ID NO: 364 - DNA, 25 bp, Homo sapiens
tccttgtgcctgctcctgtacttgt

SEQ ID NO: 365 - DNA, 25 bp, Homo sapiens
tcctccatcacctgaaacactggac

SEQ ID NO: 366 - DNA, 25 bp, Homo sapiens
ttggacatctctagtgtagctgcca

SEQ ID NO: 367 - DNA, 25 bp, Homo sapiens
tccttgtgcctgctcctgtacttgt

SEQ ID NO: 368 - DNA, 25 bp, Homo sapiens
tccttgtgcctgctcctgtacttgt

SEQ ID NO: 369 - DNA, 25 bp, Homo sapiens
aaatgtttccttgtgcctgctcctg

SEQ ID NO: 370 - DNA, 25 bp, Homo sapiens
tcctccatcacctgaaacactggac

SEQ ID NO: 371 - DNA, 25 bp, Homo sapiens
aagcctatacgtttctgtggagtaa

SEQ ID NO: 372 - DNA, 25 bp, Homo sapiens
cacccagctggtcctgtggatggga

SEQ ID NO: 373 - DNA, 25 bp, Homo sapiens
tcctgtacttgtcctcagcttgggc

SEQ ID NO: 374 - DNA, 25 bp, Homo sapiens
cacccagctggtcctgtggatggga

SEQ ID NO: 375 - DNA, 25 bp, Homo sapiens
gccccactggacaacactgattcct

SEQ ID NO: 376 - DNA, 25 bp, Homo sapiens
gccccactggacaacactgattcct

SEQ ID NO: 377 - DNA, 25 bp, Homo sapiens
tcctccatcacctgaaacactggac

SEQ ID NO: 378 - DNA, 25 bp, Homo sapiens
tcctgtacttgtcctcagcttgggc

SEQ ID NO: 379 - DNA, 25 bp, Homo sapiens
aaatgtttccttgtgcctgctcctg

SEQ ID NO: 380 - DNA, 25 bp, Homo sapiens
aaatgtttccttgtgcctgctcctg

SEQ ID NO: 381 - DNA, 25 bp, Homo sapiens
cacccagctggtcctgtggatggga

SEQ ID NO: 382 - DNA, 25 bp, Homo sapiens
tgcctgctcctgtacttgtcctcag

SEQ ID NO: 383 - DNA, 25 bp, Homo sapiens
aaatgtttccttgtgcctgctcctg

SEQ ID NO: 384 - DNA, 25 bp, Homo sapiens
aaatgtttccttgtgcctgctcctg

SEQ ID NO: 385 - DNA, 25 bp, Homo sapiens
tggaccccactggctgagaatctgg

SEQ ID NO: 386 - DNA, 25 bp, Homo sapiens
cacccagctggtcctgtggatggga

SEQ ID NO: 387 - DNA, 25 bp, Homo sapiens
tcctccatcacctgaaacactggac

SEQ ID NO: 388 - DNA, 25 bp, Homo sapiens
cacccagctggtcctgtggatggga

SEQ ID NO: 389 - DNA, 25 bp, Homo sapiens
acttgtcctcagcttgggcttcttc

SEQ ID NO: 390 - DNA, 25 bp, Homo sapiens
acttgtcctcagcttgggcttcttc

SEQ ID NO: 391 - DNA, 25 bp, Homo sapiens
cacccagctggtcctgtggatggga

SEQ ID NO: 392 - DNA, 25 bp, Homo sapiens
gccccactggacaacactgattcct

SEQ ID NO: 393 - DNA, 25 bp, Homo sapiens
acttgtcctcagcttgggcttcttc

SEQ ID NO: 394 - DNA, 25 bp, Homo sapiens
aagcctatacgtttctgtggagtaa

SEQ ID NO: 395 - DNA, 25 bp, Homo sapiens
tggaccccactggctgagaatctgg

SEQ ID NO: 396 - DNA, 25 bp, Homo sapiens
tgcctgctcctgtacttgtcctcag

SEQ ID NO: 397 - DNA, 25 bp, Homo sapiens
acttgtcctcagcttgggcttcttc

SEQ ID NO: 398 - DNA, 25 bp, Homo sapiens
aagcctatacgtttctgtggagtaa

SEQ ID NO: 399 - DNA, 25 bp, Homo sapiens
tccttgtgcctgctcctgtacttgt

SEQ ID NO: 400 - DNA, 25 bp, Homo sapiens
ttggacatctctagtgtagctgcca

SEQ ID NO: 401 - DNA, 25 bp, Homo sapiens
tgcctgctcctgtacttgtcctcag

SEQ ID NO: 402 - DNA, 25 bp, Homo sapiens
acttgtcctcagcttgggcttcttc

SEQ ID NO: 403 - DNA, 25 bp, Homo sapiens
gccccactggacaacactgattcct

SEQ ID NO: 404 - DNA, 25 bp, Homo sapiens
ttggacatctctagtgtagctgcca

SEQ ID NO: 405 - DNA, 25 bp, Homo sapiens
tggaccccactggctgagaatctgg

SEQ ID NO: 406 - DNA, 25 bp, Homo sapiens
tggaccccactggctgagaatctgg

SEQ ID NO: 407 - DNA, 25 bp, Homo sapiens
acttgtcctcagcttgggcttcttc

SEQ ID NO: 408 - DNA, 25 bp, Homo sapiens
cacccagctggtcctgtggatggga

SEQ ID NO: 409 - DNA, 25 bp, Homo sapiens
acttgtcctcagcttgggcttcttc

SEQ ID NO: 410 - DNA, 25 bp, Homo sapiens
tgcctgctcctgtacttgtcctcag

SEQ ID NO: 411 - DNA, 25 bp, Homo sapiens
acttgtcctcagcttgggcttcttc

SEQ ID NO: 412 - DNA, 25 bp, Homo sapiens
aaatgtttccttgtgcctgctcctg

SEQ ID NO: 413 - DNA, 25 bp, Homo sapiens
ttggacatctctagtgtagctgcca

SEQ ID NO: 414 - DNA, 25 bp, Homo sapiens
ttggacatctctagtgtagctgcca

SEQ ID NO: 415 - DNA, 25 bp, Homo sapiens
tccttgtgcctgctcctgtacttgt

SEQ ID NO: 416 - DNA, 25 bp, Homo sapiens
ttggacatctctagtgtagctgcca

SEQ ID NO: 417 - DNA, 25 bp, Homo sapiens
gccccactggacaacactgattcct

SEQ ID NO: 418 - DNA, 25 bp, Homo sapiens
tggaccccactggctgagaatctgg

SEQ ID NO: 419 - DNA, 25 bp, Homo sapiens
tcctgtacttgtcctcagcttgggc

SEQ ID NO: 420 - DNA, 25 bp, Homo sapiens
tcctccatcacctgaaacactggac

SEQ ID NO: 421 - DNA, 25 bp, Homo sapiens
aaatgtttccttgtgcctgctcctg

SEQ ID NO: 422 - DNA, 25 bp, Homo sapiens
tggaccccactggctgagaatctgg

SEQ ID NO: 423 - DNA, 25 bp, Homo sapiens
tggaccccactggctgagaatctgg

SEQ ID NO: 424 - DNA, 25 bp, Homo sapiens
tggaccccactggctgagaatctgg

SEQ ID NO: 425 - DNA, 25 bp, Homo sapiens
aagcctatacgtttctgtggagtaa

SEQ ID NO: 426 - DNA, 25 bp, Homo sapiens
tccttgtgcctgctcctgtacttgt

SEQ ID NO: 427 - DNA, 25 bp, Homo sapiens
tccttgtgcctgctcctgtacttgt

SEQ ID NO: 428 - DNA, 25 bp, Homo sapiens
gccccactggacaacactgattcct

SEQ ID NO: 429 - DNA, 25 bp, Homo sapiens
cacccagctggtcctgtggatggga

SEQ ID NO: 430 - DNA, 25 bp, Homo sapiens
tcctccatcacctgaaacactggac

SEQ ID NO: 431 - DNA, 25 bp, Homo sapiens
tggaccccactggctgagaatctgg

SEQ ID NO: 432 - DNA, 25 bp, Homo sapiens
tcctgtacttgtcctcagcttgggc

SEQ ID NO: 433 - DNA, 25 bp, Homo sapiens
tcctgtacttgtcctcagcttgggc

SEQ ID NO: 434 - DNA, 25 bp, Homo sapiens
gccccactggacaacactgattcct

SEQ ID NO: 435 - DNA, 25 bp, Homo sapiens
cacccagctggtcctgtggatggga

SEQ ID NO: 436 - DNA, 25 bp, Homo sapiens
tggaccccactggctgagaatctgg

SEQ ID NO: 437 - DNA, 25 bp, Homo sapiens
gccccactggacaacactgattcct

SEQ ID NO: 438 - DNA, 25 bp, Homo sapiens
gccccactggacaacactgattcct

SEQ ID NO: 439 - DNA, 25 bp, Homo sapiens
acttgtcctcagcttgggcttcttc

SEQ ID NO: 440 - DNA, 25 bp, Homo sapiens
gccccactggacaacactgattcct

SEQ ID NO: 441 - DNA, 25 bp, Homo sapiens
cacccagctggtcctgtggatggga

SEQ ID NO: 442 - DNA, 25 bp, Homo sapiens
tggaccccactggctgagaatctgg

SEQ ID NO: 443 - DNA, 25 bp, Homo sapiens
cacccagctggtcctgtggatggga

SEQ ID NO: 444 - DNA, 25 bp, Homo sapiens
cacccagctggtcctgtggatggga

SEQ ID NO: 445 - DNA, 25 bp, Homo sapiens
cacccagctggtcctgtggatggga

SEQ ID NO: 446 - DNA, 25 bp, Homo sapiens
tcctgtacttgtcctcagcttgggc

SEQ ID NO: 447 - DNA, 25 bp, Homo sapiens
tcctccatcacctgaaacactggac

SEQ ID NO: 448 - DNA, 25 bp, Homo sapiens
cacccagctggtcctgtggatggga

SEQ ID NO: 449 - DNA, 25 bp, Homo sapiens
ttggacatctctagtgtagctgcca

SEQ ID NO: 450 - DNA, 25 bp, Homo sapiens
tggaccccactggctgagaatctgg

SEQ ID NO: 451 - DNA, 25 bp, Homo sapiens
tcctccatcacctgaaacactggac

SEQ ID NO: 452 - DNA, 25 bp, Homo sapiens
tcctccatcacctgaaacactggac

SEQ ID NO: 453 - DNA, 25 bp, Homo sapiens
acttgtcctcagcttgggcttcttc

SEQ ID NO: 454 - DNA, 25 bp, Homo sapiens
ttggacatctctagtgtagctgcca

SEQ ID NO: 455 - DNA, 25 bp, Homo sapiens
ttggacatctctagtgtagctgcca

SEQ ID NO: 456 - DNA, 25 bp, Homo sapiens
tggaccccactggctgagaatctgg

SEQ ID NO: 457 - DNA, 25 bp, Homo sapiens
ttggacatctctagtgtagctgcca

SEQ ID NO: 458 - DNA, 25 bp, Homo sapiens
gccccactggacaacactgattcct

SEQ ID NO: 459 - DNA, 25 bp, Homo sapiens
tgcctgctcctgtacttgtcctcag

SEQ ID NO: 460 - DNA, 25 bp, Homo sapiens
tgcctgctcctgtacttgtcctcag

SEQ ID NO: 461 - DNA, 25 bp, Homo sapiens
gccccactggacaacactgattcct

SEQ ID NO: 462 - DNA, 25 bp, Homo sapiens
tcctgtacttgtcctcagcttgggc

SEQ ID NO: 463 - DNA, 25 bp, Homo sapiens
tcctccatcacctgaaacactggac

SEQ ID NO: 464 - DNA, 25 bp, Homo sapiens
aagcctatacgtttctgtggagtaa

SEQ ID NO: 465 - DNA, 25 bp, Homo sapiens
acttgtcctcagcttgggcttcttc

SEQ ID NO: 466 - DNA, 25 bp, Homo sapiens
acttgtcctcagcttgggcttcttc

SEQ ID NO: 467 - DNA, 25 bp, Homo sapiens
ttggacatctctagtgtagctgcca

SEQ ID NO: 468 - DNA, 25 bp, Homo sapiens
tgcctgctcctgtacttgtcctcag

SEQ ID NO: 469 - DNA, 25 bp, Homo sapiens
aagcctatacgtttctgtggagtaa

SEQ ID NO: 470 - DNA, 25 bp, Homo sapiens
gccccactggacaacactgattcct

SEQ ID NO: 471 - DNA, 25 bp, Homo sapiens
cacccagctggtcctgtggatggga

SEQ ID NO: 472 - DNA, 25 bp, Homo sapiens
tcctccatcacctgaaacactggac

SEQ ID NO: 473 - DNA, 25 bp, Homo sapiens
tggaccccactggctgagaatctgg

SEQ ID NO: 474 - DNA, 25 bp, Homo sapiens
tcctgtacttgtcctcagcttgggc

SEQ ID NO: 475 - DNA, 25 bp, Homo sapiens
cacccagctggtcctgtggatggga

SEQ ID NO: 476 - DNA, 25 bp, Homo sapiens
cacccagctggtcctgtggatggga

SEQ ID NO: 477 - DNA, 25 bp, Homo sapiens
tccttgtgcctgctcctgtacttgt

SEQ ID NO: 478 - DNA, 25 bp, Homo sapiens
aaatgtttccttgtgcctgctcctg

SEQ ID NO: 479 - DNA, 25 bp, Homo sapiens
aagcctatacgtttctgtggagtaa

SEQ ID NO: 480 - DNA, 25 bp, Homo sapiens
acttgtcctcagcttgggcttcttc

SEQ ID NO: 481 - DNA, 25 bp, Homo sapiens
ttggacatctctagtgtagctgcca

SEQ ID NO: 482 - DNA, 25 bp, Homo sapiens
tcctccatcacctgaaacactggac

SEQ ID NO: 483 - DNA, 25 bp, Homo sapiens
gccccactggacaacactgattcct

SEQ ID NO: 484 - DNA, 25 bp, Homo sapiens
tgcctgctcctgtacttgtcctcag

SEQ ID NO: 485 - DNA, 25 bp, Homo sapiens
gccccactggacaacactgattcct

SEQ ID NO: 486 - DNA, 25 bp, Homo sapiens
aaatgtttccttgtgcctgctcctg

SEQ ID NO: 487 - DNA, 25 bp, Homo sapiens
tgcctgctcctgtacttgtcctcag

SEQ ID NO: 488 - DNA, 25 bp, Homo sapiens
tcctgtacttgtcctcagcttgggc

SEQ ID NO: 489 - DNA, 25 bp, Homo sapiens
tgcctgctcctgtacttgtcctcag

SEQ ID NO: 490 - DNA, 25 bp, Homo sapiens
tcctccatcacctgaaacactggac

SEQ ID NO: 491 - DNA, 25 bp, Homo sapiens
tgcctgctcctgtacttgtcctcag

SEQ ID NO: 492 - DNA, 25 bp, Homo sapiens
tccttgtgcctgctcctgtacttgt

SEQ ID NO: 493 - DNA, 25 bp, Homo sapiens
aagcctatacgtttctgtggagtaa

SEQ ID NO: 494 - DNA, 25 bp, Homo sapiens
tcctccatcacctgaaacactggac

SEQ ID NO: 495 - DNA, 25 bp, Homo sapiens
tccttgtgcctgctcctgtacttgt

SEQ ID NO: 496 - DNA, 25 bp, Homo sapiens
tgcctgctcctgtacttgtcctcag

SEQ ID NO: 497 - DNA, 25 bp, Homo sapiens
cacccagctggtcctgtggatggga

SEQ ID NO: 498 - DNA, 25 bp, Homo sapiens
acttgtcctcagcttgggcttcttc

SEQ ID NO: 499 - DNA, 25 bp, Homo sapiens
aaatgtttccttgtgcctgctcctg

SEQ ID NO: 500 - DNA, 25 bp, Homo sapiens
tccttgtgcctgctcctgtacttgt

SEQ ID NO: 501 - DNA, 25 bp, Homo sapiens
tcctgtacttgtcctcagcttgggc

SEQ ID NO: 502 - DNA, 25 bp, Homo sapiens
ttggacatctctagtgtagctgcca

SEQ ID NO: 503 - DNA, 25 bp, Homo sapiens
gccccactggacaacactgattcct

SEQ ID NO: 504 - DNA, 25 bp, Homo sapiens
tcctccatcacctgaaacactggac

SEQ ID NO: 505 - DNA, 25 bp, Homo sapiens
tccttgtgcctgctcctgtacttgt

SEQ ID NO: 506 - DNA, 25 bp, Homo sapiens
ttggacatctctagtgtagctgcca

SEQ ID NO: 507 - DNA, 25 bp, Homo sapiens
tccttgtgcctgctcctgtacttgt

SEQ ID NO: 508 - DNA, 25 bp, Homo sapiens
cacccagctggtcctgtggatggga

SEQ ID NO: 509 - DNA, 25 bp, Homo sapiens
aaatgtttccttgtgcctgctcctg

SEQ ID NO: 510 - DNA, 25 bp, Homo sapiens
gccccactggacaacactgattcct

SEQ ID NO: 511 - DNA, 25 bp, Homo sapiens
gccccactggacaacactgattcct

SEQ ID NO: 512 - DNA, 25 bp, Homo sapiens
tgcctgctcctgtacttgtcctcag

SEQ ID NO: 513 - DNA, 25 bp, Homo sapiens
gccccactggacaacactgattcct

SEQ ID NO: 514 - DNA, 25 bp, Homo sapiens
tccttgtgcctgctcctgtacttgt

SEQ ID NO: 515 - DNA, 25 bp, Homo sapiens
tgcctgctcctgtacttgtcctcag

SEQ ID NO: 516 - DNA, 25 bp, Homo sapiens
cacccagctggtcctgtggatggga

SEQ ID NO: 517 - DNA, 25 bp, Homo sapiens
tggaccccactggctgagaatctgg

SEQ ID NO: 518 - DNA, 25 bp, Homo sapiens
acttgtcctcagcttgggcttcttc

SEQ ID NO: 519 - DNA, 25 bp, Homo sapiens
tcctccatcacctgaaacactggac

SEQ ID NO: 520 - DNA, 25 bp, Homo sapiens
cacccagctggtcctgtggatggga

SEQ ID NO: 521 - DNA, 25 bp, Homo sapiens
ttggacatctctagtgtagctgcca

SEQ ID NO: 522 - DNA, 25 bp, Homo sapiens
ttggacatctctagtgtagctgcca

SEQ ID NO: 523 - DNA, 25 bp, Homo sapiens
ttggacatctctagtgtagctgcca

SEQ ID NO: 524 - DNA, 25 bp, Homo sapiens
tggaccccactggctgagaatctgg

SEQ ID NO: 525 - DNA, 25 bp, Homo sapiens
cacccagctggtcctgtggatggga

SEQ ID NO: 526 - DNA, 25 bp, Homo sapiens
acttgtcctcagcttgggcttcttc

SEQ ID NO: 527 - DNA, 25 bp, Homo sapiens
acttgtcctcagcttgggcttcttc

SEQ ID NO: 528 - DNA, 25 bp, Homo sapiens
tcctccatcacctgaaacactggac

SEQ ID NO: 529 - DNA, 25 bp, Homo sapiens
ttggacatctctagtgtagctgcca

SEQ ID NO: 530 - DNA, 25 bp, Homo sapiens
tcctccatcacctgaaacactggac

SEQ ID NO: 531 - DNA, 25 bp, Homo sapiens
cacccagctggtcctgtggatggga

SEQ ID NO: 532 - DNA, 25 bp, Homo sapiens
aagcctatacgtttctgtggagtaa

SEQ ID NO: 533 - DNA, 25 bp, Homo sapiens
tgcctgctcctgtacttgtcctcag

SEQ ID NO: 534 - DNA, 25 bp, Homo sapiens
tcctccatcacctgaaacactggac

SEQ ID NO: 535 - DNA, 25 bp, Homo sapiens
tcctgtacttgtcctcagcttgggc

SEQ ID NO: 536 - DNA, 25 bp, Homo sapiens
ttggacatctctagtgtagctgcca

SEQ ID NO: 537 - DNA, 25 bp, Homo sapiens
ttggacatctctagtgtagctgcca

SEQ ID NO: 538 - DNA, 25 bp, Homo sapiens
gccccactggacaacactgattcct

SEQ ID NO: 539 - DNA, 25 bp, Homo sapiens
tgcctgctcctgtacttgtcctcag

SEQ ID NO: 540 - DNA, 25 bp, Homo sapiens
tcctgtacttgtcctcagcttgggc

SEQ ID NO: 541 - DNA, 25 bp, Homo sapiens
tggaccccactggctgagaatctgg

SEQ ID NO: 542 - DNA, 25 bp, Homo sapiens
ttggacatctctagtgtagctgcca

SEQ ID NO: 543 - DNA, 25 bp, Homo sapiens
tgcctgctcctgtacttgtcctcag

SEQ ID NO: 544 - DNA, 25 bp, Homo sapiens
tccttgtgcctgctcctgtacttgt

SEQ ID NO: 545 - DNA, 25 bp, Homo sapiens
cacccagctggtcctgtggatggga

SEQ ID NO: 546 - DNA, 25 bp, Homo sapiens
acttgtcctcagcttgggcttcttc

SEQ ID NO: 547 - DNA, 25 bp, Homo sapiens
tccttgtgcctgctcctgtacttgt

SEQ ID NO: 548 - DNA, 25 bp, Homo sapiens
aaatgtttccttgtgcctgctcctg

SEQ ID NO: 549 - DNA, 25 bp, Homo sapiens
cacccagctggtcctgtggatggga

SEQ ID NO: 550 - DNA, 25 bp, Homo sapiens
tgcctgctcctgtacttgtcctcag

SEQ ID NO: 551 - DNA, 25 bp, Homo sapiens
tcctgtacttgtcctcagcttgggc

SEQ ID NO: 552 - DNA, 25 bp, Homo sapiens
ttggacatctctagtgtagctgcca

SEQ ID NO: 553 - DNA, 25 bp, Homo sapiens
tggaccccactggctgagaatctgg

SEQ ID NO: 554 - DNA, 25 bp, Homo sapiens
tccttgtgcctgctcctgtacttgt

SEQ ID NO: 555 - DNA, 25 bp, Homo sapiens
aagcctatacgtttctgtggagtaa

SEQ ID NO: 556 - DNA, 25 bp, Homo sapiens
tccttgtgcctgctcctgtacttgt

SEQ ID NO: 557 - DNA, 25 bp, Homo sapiens
ttggacatctctagtgtagctgcca

SEQ ID NO: 558 - DNA, 25 bp, Homo sapiens
cacccagctggtcctgtggatggga

SEQ ID NO: 559 - DNA, 25 bp, Homo sapiens
tcctgtacttgtcctcagcttgggc

SEQ ID NO: 560 - DNA, 25 bp, Homo sapiens
gccccactggacaacactgattcct

SEQ ID NO: 561 - DNA, 25 bp, Homo sapiens
tccttgtgcctgctcctgtacttgt

SEQ ID NO: 562 - DNA, 25 bp, Homo sapiens
acttgtcctcagcttgggcttcttc

SEQ ID NO: 563 - DNA, 25 bp, Homo sapiens
gccccactggacaacactgattcct

SEQ ID NO: 564 - DNA, 25 bp, Homo sapiens
tcctgtacttgtcctcagcttgggc

SEQ ID NO: 565 - DNA, 25 bp, Homo sapiens
tgcctgctcctgtacttgtcctcag

SEQ ID NO: 566 - DNA, 25 bp, Homo sapiens
tggaccccactggctgagaatctgg

SEQ ID NO: 567 - DNA, 25 bp, Homo sapiens
ttggacatctctagtgtagctgcca

SEQ ID NO: 568 - DNA, 25 bp, Homo sapiens
tccttgtgcctgctcctgtacttgt

SEQ ID NO: 569 - DNA, 25 bp, Homo sapiens
ttggacatctctagtgtagctgcca

SEQ ID NO: 570 - DNA, 25 bp, Homo sapiens
gccccactggacaacactgattcct

SEQ ID NO: 571 - DNA, 25 bp, Homo sapiens
ttggacatctctagtgtagctgcca

SEQ ID NO: 572 - DNA, 25 bp, Homo sapiens
tgcctgctcctgtacttgtcctcag

SEQ ID NO: 573 - DNA, 25 bp, Homo sapiens
tggaccccactggctgagaatctgg

SEQ ID NO: 574 - DNA, 25 bp, Homo sapiens
gccccactggacaacactgattcct

SEQ ID NO: 575 - DNA, 25 bp, Homo sapiens
tccttgtgcctgctcctgtacttgt

SEQ ID NO: 576 - DNA, 25 bp, Homo sapiens
cacccagctggtcctgtggatggga

SEQ ID NO: 577 - DNA, 25 bp, Homo sapiens
gccccactggacaacactgattcct

SEQ ID NO: 578 - DNA, 25 bp, Homo sapiens
aagcctatacgtttctgtggagtaa

SEQ ID NO: 579 - DNA, 25 bp, Homo sapiens
tccttgtgcctgctcctgtacttgt

SEQ ID NO: 580 - DNA, 25 bp, Homo sapiens
tgcctgctcctgtacttgtcctcag

SEQ ID NO: 581 - DNA, 25 bp, Homo sapiens
acttgtcctcagcttgggcttcttc

SEQ ID NO: 582 - DNA, 25 bp, Homo sapiens
gccccactggacaacactgattcct

SEQ ID NO: 583 - DNA, 25 bp, Homo sapiens
aaatgtttccttgtgcctgctcctg

SEQ ID NO: 584 - DNA, 25 bp, Homo sapiens
aagcctatacgtttctgtggagtaa

SEQ ID NO: 585 - DNA, 25 bp, Homo sapiens
ttggacatctctagtgtagctgcca

SEQ ID NO: 586 - DNA, 25 bp, Homo sapiens
tccttgtgcctgctcctgtacttgt

SEQ ID NO: 587 - DNA, 25 bp, Homo sapiens
gccccactggacaacactgattcct

SEQ ID NO: 588 - DNA, 25 bp, Homo sapiens
aagcctatacgtttctgtggagtaa

SEQ ID NO: 589 - DNA, 25 bp, Homo sapiens
tggaccccactggctgagaatctgg

SEQ ID NO: 590 - DNA, 25 bp, Homo sapiens
tccttgtgcctgctcctgtacttgt

SEQ ID NO: 591 - DNA, 25 bp, Homo sapiens
aagcctatacgtttctgtggagtaa

SEQ ID NO: 592 - DNA, 25 bp, Homo sapiens
tggaccccactggctgagaatctgg

SEQ ID NO: 593 - DNA, 25 bp, Homo sapiens
ttggacatctctagtgtagctgcca

SEQ ID NO: 594 - DNA, 25 bp, Homo sapiens
acttgtcctcagcttgggcttcttc

SEQ ID NO: 595 - DNA, 25 bp, Homo sapiens
aaatgtttccttgtgcctgctcctg

SEQ ID NO: 596 - DNA, 25 bp, Homo sapiens
acttgtcctcagcttgggcttcttc

SEQ ID NO: 597 - DNA, 25 bp, Homo sapiens
tcctccatcacctgaaacactggac

SEQ ID NO: 598 - DNA, 25 bp, Homo sapiens
aaatgtttccttgtgcctgctcctg

SEQ ID NO: 599 - DNA, 25 bp, Homo sapiens
tgcctgctcctgtacttgtcctcag

SEQ ID NO: 600 - DNA, 25 bp, Homo sapiens
gccccactggacaacactgattcct

SEQ ID NO: 601 - DNA, 25 bp, Homo sapiens
aaatgtttccttgtgcctgctcctg

SEQ ID NO: 602 - DNA, 25 bp, Homo sapiens
tggaccccactggctgagaatctgg

SEQ ID NO: 603 - DNA, 25 bp, Homo sapiens
acttgtcctcagcttgggcttcttc

SEQ ID NO: 604 - DNA, 25 bp, Homo sapiens
tcctgtacttgtcctcagcttgggc

SEQ ID NO: 605 - DNA, 25 bp, Homo sapiens
tgcctgctcctgtacttgtcctcag

SEQ ID NO: 606 - DNA, 25 bp, Homo sapiens
acttgtcctcagcttgggcttcttc

SEQ ID NO: 607 - DNA, 25 bp, Homo sapiens
gccccactggacaacactgattcct

SEQ ID NO: 608 - DNA, 25 bp, Homo sapiens
aaatgtttccttgtgcctgctcctg

SEQ ID NO: 609 - DNA, 25 bp, Homo sapiens
tcctccatcacctgaaacactggac

SEQ ID NO: 610 - DNA, 25 bp, Homo sapiens
aaatgtttccttgtgcctgctcctg

SEQ ID NO: 611 - DNA, 25 bp, Homo sapiens
tggaccccactggctgagaatctgg

SEQ ID NO: 612 - DNA, 25 bp, Homo sapiens
tcctccatcacctgaaacactggac

SEQ ID NO: 613 - DNA, 25 bp, Homo sapiens
gccccactggacaacactgattcct

SEQ ID NO: 614 - DNA, 25 bp, Homo sapiens
aagcctatacgtttctgtggagtaa

SEQ ID NO: 615 - DNA, 25 bp, Homo sapiens
cacccagctggtcctgtggatggga

SEQ ID NO: 616 - DNA, 25 bp, Homo sapiens
tccttgtgcctgctcctgtacttgt

SEQ ID NO: 617 - DNA, 25 bp, Homo sapiens
tggaccccactggctgagaatctgg

SEQ ID NO: 618 - DNA, 25 bp, Homo sapiens
ttggacatctctagtgtagctgcca

SEQ ID NO: 619 - DNA, 25 bp, Homo sapiens
tccttgtgcctgctcctgtacttgt

SEQ ID NO: 620 - DNA, 25 bp, Homo sapiens
cacccagctggtcctgtggatggga

SEQ ID NO: 621 - DNA, 25 bp, Homo sapiens
tggaccccactggctgagaatctgg

SEQ ID NO: 622 - DNA, 25 bp, Homo sapiens
aaatgtttccttgtgcctgctcctg

SEQ ID NO: 623 - DNA, 25 bp, Homo sapiens
tcctgtacttgtcctcagcttgggc

SEQ ID NO: 624 - DNA, 25 bp, Homo sapiens
ttggacatctctagtgtagctgcca

SEQ ID NO: 625 - DNA, 25 bp, Homo sapiens
cacccagctggtcctgtggatggga

SEQ ID NO: 626 - DNA, 25 bp, Homo sapiens
tggaccccactggctgagaatctgg

SEQ ID NO: 627 - DNA, 25 bp, Homo sapiens
acttgtcctcagcttgggcttcttc

SEQ ID NO: 628 - DNA, 25 bp, Homo sapiens
tcctccatcacctgaaacactggac

SEQ ID NO: 629 - DNA, 25 bp, Homo sapiens
tcctgtacttgtcctcagcttgggc

SEQ ID NO: 630 - DNA, 25 bp, Homo sapiens
tggaccccactggctgagaatctgg

SEQ ID NO: 631 - DNA, 25 bp, Homo sapiens
acttgtcctcagcttgggcttcttc

SEQ ID NO: 632 - DNA, 25 bp, Homo sapiens
ttggacatctctagtgtagctgcca

SEQ ID NO: 633 - DNA, 25 bp, Homo sapiens
aaatgtttccttgtgcctgctcctg

SEQ ID NO: 634 - DNA, 25 bp, Homo sapiens
tggaccccactggctgagaatctgg

SEQ ID NO: 635 - DNA, 25 bp, Homo sapiens
acttgtcctcagcttgggcttcttc

SEQ ID NO: 636 - DNA, 25 bp, Homo sapiens
aagcctatacgtttctgtggagtaa

SEQ ID NO: 637 - DNA, 25 bp, Homo sapiens
tcctccatcacctgaaacactggac

SEQ ID NO: 638 - DNA, 25 bp, Homo sapiens
tccttgtgcctgctcctgtacttgt

SEQ ID NO: 639 - DNA, 25 bp, Homo sapiens
tcctgtacttgtcctcagcttgggc

SEQ ID NO: 640 - DNA, 25 bp, Homo sapiens
tgcctgctcctgtacttgtcctcag

SEQ ID NO: 641 - DNA, 25 bp, Homo sapiens
tgcctgctcctgtacttgtcctcag

SEQ ID NO: 642 - DNA, 25 bp, Homo sapiens
acttgtcctcagcttgggcttcttc

SEQ ID NO: 643 - DNA, 25 bp, Homo sapiens
ttggacatctctagtgtagctgcca

SEQ ID NO: 644 - DNA, 25 bp, Homo sapiens
gccccactggacaacactgattcct

SEQ ID NO: 645 - DNA, 25 bp, Homo sapiens
gccccactggacaacactgattcct

SEQ ID NO: 646 - DNA, 25 bp, Homo sapiens
tgcctgctcctgtacttgtcctcag

SEQ ID NO: 647 - DNA, 25 bp, Homo sapiens
acttgtcctcagcttgggcttcttc

SEQ ID NO: 648 - DNA, 25 bp, Homo sapiens
aaatgtttccttgtgcctgctcctg

SEQ ID NO: 649 - DNA, 25 bp, Homo sapiens
cacccagctggtcctgtggatggga

SEQ ID NO: 650 - DNA, 25 bp, Homo sapiens
aaatgtttccttgtgcctgctcctg

SEQ ID NO: 651 - DNA, 25 bp, Homo sapiens
tcctgtacttgtcctcagcttgggc

SEQ ID NO: 652 - DNA, 25 bp, Homo sapiens
tcctgtacttgtcctcagcttgggc

SEQ ID NO: 653 - DNA, 25 bp, Homo sapiens
tcctccatcacctgaaacactggac

SEQ ID NO: 654 - DNA, 25 bp, Homo sapiens
tgcctgctcctgtacttgtcctcag

SEQ ID NO: 655 - DNA, 25 bp, Homo sapiens
tgcctgctcctgtacttgtcctcag

SEQ ID NO: 656 - DNA, 25 bp, Homo sapiens
ttggacatctctagtgtagctgcca

SEQ ID NO: 657 - DNA, 25 bp, Homo sapiens
tcctgtacttgtcctcagcttgggc

SEQ ID NO: 658 - DNA, 25 bp, Homo sapiens
tggaccccactggctgagaatctgg

SEQ ID NO: 659 - DNA, 25 bp, Homo sapiens
tgcctgctcctgtacttgtcctcag

SEQ ID NO: 660 - DNA, 25 bp, Homo sapiens
tgcctgctcctgtacttgtcctcag

SEQ ID NO: 661 - DNA, 25 bp, Homo sapiens
tgcctgctcctgtacttgtcctcag

SEQ ID NO: 662 - DNA, 25 bp, Homo sapiens
cacccagctggtcctgtggatggga

SEQ ID NO: 663 - DNA, 25 bp, Homo sapiens
cacccagctggtcctgtggatggga

SEQ ID NO: 664 - DNA, 25 bp, Homo sapiens
aaatgtttccttgtgcctgctcctg

SEQ ID NO: 665 - DNA, 25 bp, Homo sapiens
tcctccatcacctgaaacactggac

SEQ ID NO: 666 - DNA, 25 bp, Homo sapiens
ttggacatctctagtgtagctgcca

SEQ ID NO: 667 - DNA, 25 bp, Homo sapiens
tccttgtgcctgctcctgtacttgt

SEQ ID NO: 668 - DNA, 25 bp, Homo sapiens
ttggacatctctagtgtagctgcca

SEQ ID NO: 669 - DNA, 25 bp, Homo sapiens
tgcctgctcctgtacttgtcctcag

SEQ ID NO: 670 - DNA, 25 bp, Homo sapiens
aagcctatacgtttctgtggagtaa

SEQ ID NO: 671 - DNA, 25 bp, Homo sapiens
gccccactggacaacactgattcct

SEQ ID NO: 672 - DNA, 25 bp, Homo sapiens
gccccactggacaacactgattcct

SEQ ID NO: 673 - DNA, 25 bp, Homo sapiens
tcctgtacttgtcctcagcttgggc

SEQ ID NO: 674 - DNA, 25 bp, Homo sapiens
aagcctatacgtttctgtggagtaa

SEQ ID NO: 675 - DNA, 25 bp, Homo sapiens
aagcctatacgtttctgtggagtaa

SEQ ID NO: 676 - DNA, 25 bp, Homo sapiens
aaatgtttccttgtgcctgctcctg

SEQ ID NO: 677 - DNA, 25 bp, Homo sapiens
gccccactggacaacactgattcct

SEQ ID NO: 678 - DNA, 25 bp, Homo sapiens
tggaccccactggctgagaatctgg

SEQ ID NO: 679 - DNA, 25 bp, Homo sapiens
tcctccatcacctgaaacactggac

SEQ ID NO: 680 - DNA, 25 bp, Homo sapiens
cacccagctggtcctgtggatggga

SEQ ID NO: 681 - DNA, 25 bp, Homo sapiens
tggaccccactggctgagaatctgg

SEQ ID NO: 682 - DNA, 25 bp, Homo sapiens
aagcctatacgtttctgtggagtaa

SEQ ID NO: 683 - DNA, 25 bp, Homo sapiens
aaatgtttccttgtgcctgctcctg

SEQ ID NO: 684 - DNA, 25 bp, Homo sapiens
tcctccatcacctgaaacactggac

SEQ ID NO: 685 - DNA, 25 bp, Homo sapiens
tggaccccactggctgagaatctgg

SEQ ID NO: 686 - DNA, 25 bp, Homo sapiens
cacccagctggtcctgtggatggga

SEQ ID NO: 687 - DNA, 25 bp, Homo sapiens
tcctgtacttgtcctcagcttgggc

SEQ ID NO: 688 - DNA, 25 bp, Homo sapiens
aagcctatacgtttctgtggagtaa

SEQ ID NO: 689 - DNA, 25 bp, Homo sapiens
cacccagctggtcctgtggatggga

SEQ ID NO: 690 - DNA, 25 bp, Homo sapiens
cacccagctggtcctgtggatggga

SEQ ID NO: 691 - DNA, 25 bp, Homo sapiens
tgcctgctcctgtacttgtcctcag

SEQ ID NO: 692 - DNA, 25 bp, Homo sapiens
ttggacatctctagtgtagctgcca

SEQ ID NO: 693 - DNA, 25 bp, Homo sapiens
ttggacatctctagtgtagctgcca

SEQ ID NO: 694 - DNA, 25 bp, Homo sapiens
aagcctatacgtttctgtggagtaa

SEQ ID NO: 695 - DNA, 25 bp, Homo sapiens
tgcctgctcctgtacttgtcctcag

SEQ ID NO: 696 - DNA, 25 bp, Homo sapiens
acttgtcctcagcttgggcttcttc

SEQ ID NO: 697 - DNA, 25 bp, Homo sapiens
tggaccccactggctgagaatctgg

SEQ ID NO: 698 - DNA, 25 bp, Homo sapiens
aagcctatacgtttctgtggagtaa

SEQ ID NO: 699 - DNA, 25 bp, Homo sapiens
tccttgtgcctgctcctgtacttgt

SEQ ID NO: 700 - DNA, 25 bp, Homo sapiens
tccttgtgcctgctcctgtacttgt

SEQ ID NO: 701 - DNA, 25 bp, Homo sapiens
acttgtcctcagcttgggcttcttc

SEQ ID NO: 702 - DNA, 25 bp, Homo sapiens
acttgtcctcagcttgggcttcttc

SEQ ID NO: 703 - DNA, 25 bp, Homo sapiens
aaatgtttccttgtgcctgctcctg

SEQ ID NO: 704 - DNA, 25 bp, Homo sapiens
gccccactggacaacactgattcct

SEQ ID NO: 705 - DNA, 25 bp, Homo sapiens
ttggacatctctagtgtagctgcca

SEQ ID NO: 706 - DNA, 25 bp, Homo sapiens
tggaccccactggctgagaatctgg

SEQ ID NO: 707 - DNA, 25 bp, Homo sapiens
cacccagctggtcctgtggatggga

SEQ ID NO: 708 - DNA, 25 bp, Homo sapiens
tggaccccactggctgagaatctgg

SEQ ID NO: 709 - DNA, 25 bp, Homo sapiens
acttgtcctcagcttgggcttcttc

SEQ ID NO: 710 - DNA, 25 bp, Homo sapiens
tgcctgctcctgtacttgtcctcag

SEQ ID NO: 711 - DNA, 25 bp, Homo sapiens
aaatgtttccttgtgcctgctcctg

SEQ ID NO: 712 - DNA, 25 bp, Homo sapiens
acttgtcctcagcttgggcttcttc

SEQ ID NO: 713 - DNA, 25 bp, Homo sapiens
tccttgtgcctgctcctgtacttgt

SEQ ID NO: 714 - DNA, 25 bp, Homo sapiens
gccccactggacaacactgattcct

SEQ ID NO: 715 - DNA, 25 bp, Homo sapiens
aagcctatacgtttctgtggagtaa

SEQ ID NO: 716 - DNA, 25 bp, Homo sapiens
aagcctatacgtttctgtggagtaa

SEQ ID NO: 717 - DNA, 25 bp, Homo sapiens
tcctgtacttgtcctcagcttgggc

SEQ ID NO: 718 - DNA, 25 bp, Homo sapiens
aaatgtttccttgtgcctgctcctg

SEQ ID NO: 719 - DNA, 25 bp, Homo sapiens
aagcctatacgtttctgtggagtaa

SEQ ID NO: 720 - DNA, 25 bp, Homo sapiens
tgcctgctcctgtacttgtcctcag

SEQ ID NO: 721 - DNA, 25 bp, Homo sapiens
tgcctgctcctgtacttgtcctcag

SEQ ID NO: 722 - DNA, 25 bp, Homo sapiens
tgcctgctcctgtacttgtcctcag

SEQ ID NO: 723 - DNA, 25 bp, Homo sapiens
aaatgtttccttgtgcctgctcctg

SEQ ID NO: 724 - DNA, 25 bp, Homo sapiens
ttggacatctctagtgtagctgcca

SEQ ID NO: 725 - DNA, 25 bp, Homo sapiens
ttggacatctctagtgtagctgcca

SEQ ID NO: 726 - DNA, 25 bp, Homo sapiens
cacccagctggtcctgtggatggga

SEQ ID NO: 727 - DNA, 25 bp, Homo sapiens
tcctgtacttgtcctcagcttgggc

SEQ ID NO: 728 - DNA, 25 bp, Homo sapiens
cacccagctggtcctgtggatggga

SEQ ID NO: 729 - DNA, 25 bp, Homo sapiens
tggaccccactggctgagaatctgg

SEQ ID NO: 730 - DNA, 25 bp, Homo sapiens
acttgtcctcagcttgggcttcttc

SEQ ID NO: 731 - DNA, 25 bp, Homo sapiens
acttgtcctcagcttgggcttcttc

SEQ ID NO: 732 - DNA, 25 bp, Homo sapiens
cacccagctggtcctgtggatggga

SEQ ID NO: 733 - DNA, 25 bp, Homo sapiens
ttggacatctctagtgtagctgcca

SEQ ID NO: 734 - DNA, 25 bp, Homo sapiens
tcctgtacttgtcctcagcttgggc

SEQ ID NO: 735 - DNA, 25 bp, Homo sapiens
tcctccatcacctgaaacactggac

SEQ ID NO: 736 - DNA, 25 bp, Homo sapiens
aagcctatacgtttctgtggagtaa

SEQ ID NO: 737 - DNA, 25 bp, Homo sapiens
acttgtcctcagcttgggcttcttc

SEQ ID NO: 738 - DNA, 25 bp, Homo sapiens
tgcctgctcctgtacttgtcctcag

SEQ ID NO: 739 - DNA, 25 bp, Homo sapiens
cacccagctggtcctgtggatggga

SEQ ID NO: 740 - DNA, 25 bp, Homo sapiens
ttggacatctctagtgtagctgcca

SEQ ID NO: 741 - DNA, 25 bp, Homo sapiens
gccccactggacaacactgattcct

SEQ ID NO: 742 - DNA, 25 bp, Homo sapiens
aaatgtttccttgtgcctgctcctg

SEQ ID NO: 743 - DNA, 25 bp, Homo sapiens
aagcctatacgtttctgtggagtaa

SEQ ID NO: 744 - DNA, 25 bp, Homo sapiens
tgcctgctcctgtacttgtcctcag

SEQ ID NO: 745 - DNA, 25 bp, Homo sapiens
ttggacatctctagtgtagctgcca

SEQ ID NO: 746 - DNA, 25 bp, Homo sapiens
tcctccatcacctgaaacactggac

SEQ ID NO: 747 - DNA, 25 bp, Homo sapiens
aagcctatacgtttctgtggagtaa

SEQ ID NO: 748 - DNA, 25 bp, Homo sapiens
tccttgtgcctgctcctgtacttgt

SEQ ID NO: 749 - DNA, 25 bp, Homo sapiens
aaatgtttccttgtgcctgctcctg

SEQ ID NO: 750 - DNA, 25 bp, Homo sapiens
tccttgtgcctgctcctgtacttgt

SEQ ID NO: 751 - DNA, 25 bp, Homo sapiens
tggaccccactggctgagaatctgg

SEQ ID NO: 752 - DNA, 25 bp, Homo sapiens
tccttgtgcctgctcctgtacttgt

SEQ ID NO: 753 - DNA, 25 bp, Homo sapiens
aaatgtttccttgtgcctgctcctg

SEQ ID NO: 754 - DNA, 25 bp, Homo sapiens
aaatgtttccttgtgcctgctcctg

SEQ ID NO: 755 - DNA, 25 bp, Homo sapiens
tcctgtacttgtcctcagcttgggc

SEQ ID NO: 756 - DNA, 25 bp, Homo sapiens
cacccagctggtcctgtggatggga

SEQ ID NO: 757 - DNA, 25 bp, Homo sapiens
tgcctgctcctgtacttgtcctcag

SEQ ID NO: 758 - DNA, 25 bp, Homo sapiens
aaatgtttccttgtgcctgctcctg

SEQ ID NO: 759 - DNA, 25 bp, Homo sapiens
tcctgtacttgtcctcagcttgggc

SEQ ID NO: 760 - DNA, 25 bp, Homo sapiens
tgcctgctcctgtacttgtcctcag

SEQ ID NO: 761 - DNA, 25 bp, Homo sapiens
tggaccccactggctgagaatctgg

SEQ ID NO: 762 - DNA, 25 bp, Homo sapiens
cacccagctggtcctgtggatggga

SEQ ID NO: 763 - DNA, 25 bp, Homo sapiens
ttggacatctctagtgtagctgcca

SEQ ID NO: 764 - DNA, 25 bp, Homo sapiens
tggaccccactggctgagaatctgg

SEQ ID NO: 765 - DNA, 25 bp, Homo sapiens
cacccagctggtcctgtggatggga

SEQ ID NO: 766 - DNA, 25 bp, Homo sapiens
tggaccccactggctgagaatctgg

SEQ ID NO: 767 - DNA, 25 bp, Homo sapiens
gccccactggacaacactgattcct

SEQ ID NO: 768 - DNA, 25 bp, Homo sapiens
tcctccatcacctgaaacactggac

SEQ ID NO: 769 - DNA, 25 bp, Homo sapiens
tcctccatcacctgaaacactggac

SEQ ID NO: 770 - DNA, 25 bp, Homo sapiens
acttgtcctcagcttgggcttcttc

SEQ ID NO: 771 - DNA, 25 bp, Homo sapiens
aagcctatacgtttctgtggagtaa

SEQ ID NO: 772 - DNA, 25 bp, Homo sapiens
tggaccccactggctgagaatctgg

SEQ ID NO: 773 - DNA, 25 bp, Homo sapiens
tcctccatcacctgaaacactggac

SEQ ID NO: 774 - DNA, 25 bp, Homo sapiens
tgcctgctcctgtacttgtcctcag

SEQ ID NO: 775 - DNA, 25 bp, Homo sapiens
tccttgtgcctgctcctgtacttgt

SEQ ID NO: 776 - DNA, 25 bp, Homo sapiens
ttggacatctctagtgtagctgcca

SEQ ID NO: 777 - DNA, 25 bp, Homo sapiens
acttgtcctcagcttgggcttcttc

SEQ ID NO: 778 - DNA, 25 bp, Homo sapiens
tccttgtgcctgctcctgtacttgt

SEQ ID NO: 779 - DNA, 25 bp, Homo sapiens
aaatgtttccttgtgcctgctcctg

SEQ ID NO: 780 - DNA, 25 bp, Homo sapiens
tccttgtgcctgctcctgtacttgt

SEQ ID NO: 781 - DNA, 25 bp, Homo sapiens
tccttgtgcctgctcctgtacttgt

SEQ ID NO: 782 - DNA, 25 bp, Homo sapiens
cacccagctggtcctgtggatggga

SEQ ID NO: 783 - DNA, 25 bp, Homo sapiens
tcctgtacttgtcctcagcttgggc

SEQ ID NO: 784 - DNA, 25 bp, Homo sapiens
tcctccatcacctgaaacactggac

SEQ ID NO: 785 - DNA, 25 bp, Homo sapiens
acttgtcctcagcttgggcttcttc

SEQ ID NO: 786 - DNA, 25 bp, Homo sapiens
acttgtcctcagcttgggcttcttc

SEQ ID NO: 787 - DNA, 25 bp, Homo sapiens
acttgtcctcagcttgggcttcttc

SEQ ID NO: 788 - DNA, 25 bp, Homo sapiens
tcctccatcacctgaaacactggac

SEQ ID NO: 789 - DNA, 25 bp, Homo sapiens
tccttgtgcctgctcctgtacttgt

SEQ ID NO: 790 - DNA, 25 bp, Homo sapiens
aagcctatacgtttctgtggagtaa

SEQ ID NO: 791 - DNA, 25 bp, Homo sapiens
gccccactggacaacactgattcct

SEQ ID NO: 792 - DNA, 25 bp, Homo sapiens
tcctccatcacctgaaacactggac

SEQ ID NO: 793 - DNA, 25 bp, Homo sapiens
aagcctatacgtttctgtggagtaa

SEQ ID NO: 794 - DNA, 25 bp, Homo sapiens
gccccactggacaacactgattcct

SEQ ID NO: 795 - DNA, 25 bp, Homo sapiens
tcctgtacttgtcctcagcttgggc

SEQ ID NO: 796 - DNA, 25 bp, Homo sapiens
ttggacatctctagtgtagctgcca

SEQ ID NO: 797 - DNA, 25 bp, Homo sapiens
aagcctatacgtttctgtggagtaa

SEQ ID NO: 798 - DNA, 25 bp, Homo sapiens
ttggacatctctagtgtagctgcca

SEQ ID NO: 799 - DNA, 25 bp, Homo sapiens
tggaccccactggctgagaatctgg

SEQ ID NO: 800 - DNA, 25 bp, Homo sapiens
tcctccatcacctgaaacactggac

SEQ ID NO: 801 - DNA, 25 bp, Homo sapiens
gccccactggacaacactgattcct

SEQ ID NO: 802 - DNA, 25 bp, Homo sapiens
gccccactggacaacactgattcct

SEQ ID NO: 803 - DNA, 25 bp, Homo sapiens
ttggacatctctagtgtagctgcca

SEQ ID NO: 804 - DNA, 25 bp, Homo sapiens
tcctccatcacctgaaacactggac

SEQ ID NO: 805 - DNA, 25 bp, Homo sapiens
tccttgtgcctgctcctgtacttgt

SEQ ID NO: 806 - DNA, 25 bp, Homo sapiens
acttgtcctcagcttgggcttcttc

SEQ ID NO: 807 - DNA, 25 bp, Homo sapiens
tgcctgctcctgtacttgtcctcag

SEQ ID NO: 808 - DNA, 25 bp, Homo sapiens
aaatgtttccttgtgcctgctcctg

SEQ ID NO: 809 - DNA, 25 bp, Homo sapiens
aaatgtttccttgtgcctgctcctg

SEQ ID NO: 810 - DNA, 25 bp, Homo sapiens
tccttgtgcctgctcctgtacttgt

SEQ ID NO: 811 - DNA, 25 bp, Homo sapiens
aaatgtttccttgtgcctgctcctg

SEQ ID NO: 812 - DNA, 25 bp, Homo sapiens
tggaccccactggctgagaatctgg

SEQ ID NO: 813 - DNA, 25 bp, Homo sapiens
cacccagctggtcctgtggatggga

SEQ ID NO: 814 - DNA, 25 bp, Homo sapiens
tcctgtacttgtcctcagcttgggc

SEQ ID NO: 815 - DNA, 25 bp, Homo sapiens
acttgtcctcagcttgggcttcttc

SEQ ID NO: 816 - DNA, 25 bp, Homo sapiens
tccttgtgcctgctcctgtacttgt

SEQ ID NO: 817 - DNA, 25 bp, Homo sapiens
tggaccccactggctgagaatctgg

SEQ ID NO: 818 - DNA, 25 bp, Homo sapiens
aagcctatacgtttctgtggagtaa

SEQ ID NO: 819 - DNA, 25 bp, Homo sapiens
tcctgtacttgtcctcagcttgggc

SEQ ID NO: 820 - DNA, 25 bp, Homo sapiens
cacccagctggtcctgtggatggga

SEQ ID NO: 821 - DNA, 25 bp, Homo sapiens
ttggacatctctagtgtagctgcca

SEQ ID NO: 822 - DNA, 25 bp, Homo sapiens
tcctgtacttgtcctcagcttgggc

SEQ ID NO: 823 - DNA, 25 bp, Homo sapiens
aaatgtttccttgtgcctgctcctg

SEQ ID NO: 824 - DNA, 25 bp, Homo sapiens
cacccagctggtcctgtggatggga

SEQ ID NO: 825 - DNA, 25 bp, Homo sapiens
tccttgtgcctgctcctgtacttgt

SEQ ID NO: 826 - DNA, 25 bp, Homo sapiens
tcctccatcacctgaaacactggac

SEQ ID NO: 827 - DNA, 25 bp, Homo sapiens
aaatgtttccttgtgcctgctcctg

SEQ ID NO: 828 - DNA, 25 bp, Homo sapiens
tcctgtacttgtcctcagcttgggc

SEQ ID NO: 829 - DNA, 25 bp, Homo sapiens
gccccactggacaacactgattcct

SEQ ID NO: 830 - DNA, 25 bp, Homo sapiens
cacccagctggtcctgtggatggga

SEQ ID NO: 831 - DNA, 25 bp, Homo sapiens
aagcctatacgtttctgtggagtaa

SEQ ID NO: 832 - DNA, 25 bp, Homo sapiens
tcctgtacttgtcctcagcttgggc

SEQ ID NO: 833 - DNA, 25 bp, Homo sapiens
acttgtcctcagcttgggcttcttc

SEQ ID NO: 834 - DNA, 25 bp, Homo sapiens
gccccactggacaacactgattcct

SEQ ID NO: 835 - DNA, 25 bp, Homo sapiens
tcctccatcacctgaaacactggac

SEQ ID NO: 836 - DNA, 25 bp, Homo sapiens
acttgtcctcagcttgggcttcttc

SEQ ID NO: 837 - DNA, 25 bp, Homo sapiens
tccttgtgcctgctcctgtacttgt

SEQ ID NO: 838 - DNA, 25 bp, Homo sapiens
aagcctatacgtttctgtggagtaa

SEQ ID NO: 839 - DNA, 25 bp, Homo sapiens
aagcctatacgtttctgtggagtaa

SEQ ID NO: 840 - DNA, 25 bp, Homo sapiens
tccttgtgcctgctcctgtacttgt

SEQ ID NO: 841 - DNA, 25 bp, Homo sapiens
aagcctatacgtttctgtggagtaa

SEQ ID NO: 842 - DNA, 25 bp, Homo sapiens
tcctccatcacctgaaacactggac

SEQ ID NO: 843 - DNA, 25 bp, Homo sapiens
tccttgtgcctgctcctgtacttgt

SEQ ID NO: 844 - DNA, 25 bp, Homo sapiens
aagcctatacgtttctgtggagtaa

SEQ ID NO: 845 - DNA, 25 bp, Homo sapiens
aagcctatacgtttctgtggagtaa

SEQ ID NO: 846 - DNA, 25 bp, Homo sapiens
tccttgtgcctgctcctgtacttgt

SEQ ID NO: 847 - DNA, 25 bp, Homo sapiens
aagcctatacgtttctgtggagtaa

SEQ ID NO: 848 - DNA, 25 bp, Homo sapiens
ttggacatctctagtgtagctgcca

SEQ ID NO: 849 - DNA, 25 bp, Homo sapiens
aagcctatacgtttctgtggagtaa

SEQ ID NO: 850 - DNA, 25 bp, Homo sapiens
tgcctgctcctgtacttgtcctcag

SEQ ID NO: 851 - DNA, 25 bp, Homo sapiens
gccccactggacaacactgattcct

SEQ ID NO: 852 - DNA, 25 bp, Homo sapiens
acttgtcctcagcttgggcttcttc

SEQ ID NO: 853 - DNA, 25 bp, Homo sapiens
tcctccatcacctgaaacactggac

SEQ ID NO: 854 - DNA, 25 bp, Homo sapiens
tcctccatcacctgaaacactggac

SEQ ID NO: 855 - DNA, 25 bp, Homo sapiens
acttgtcctcagcttgggcttcttc

SEQ ID NO: 856 - DNA, 25 bp, Homo sapiens
aaatgtttccttgtgcctgctcctg

SEQ ID NO: 857 - DNA, 25 bp, Homo sapiens
gccccactggacaacactgattcct

SEQ ID NO: 858 - DNA, 25 bp, Homo sapiens
gccccactggacaacactgattcct

SEQ ID NO: 859 - DNA, 25 bp, Homo sapiens
aagcctatacgtttctgtggagtaa

SEQ ID NO: 860 - DNA, 25 bp, Homo sapiens
ttggacatctctagtgtagctgcca

SEQ ID NO: 861 - DNA, 25 bp, Homo sapiens
acttgtcctcagcttgggcttcttc

SEQ ID NO: 862 - DNA, 25 bp, Homo sapiens
ttggacatctctagtgtagctgcca

SEQ ID NO: 863 - DNA, 25 bp, Homo sapiens
tcctgtacttgtcctcagcttgggc

SEQ ID NO: 864 - DNA, 25 bp, Homo sapiens
tcctgtacttgtcctcagcttgggc

SEQ ID NO: 865 - DNA, 25 bp, Homo sapiens
gccccactggacaacactgattcct

SEQ ID NO: 866 - DNA, 25 bp, Homo sapiens
ttggacatctctagtgtagctgcca

SEQ ID NO: 867 - DNA, 25 bp, Homo sapiens
tggaccccactggctgagaatctgg

SEQ ID NO: 868 - DNA, 25 bp, Homo sapiens
acttgtcctcagcttgggcttcttc

SEQ ID NO: 869 - DNA, 25 bp, Homo sapiens
tggaccccactggctgagaatctgg

SEQ ID NO: 870 - DNA, 25 bp, Homo sapiens
tcctgtacttgtcctcagcttgggc

SEQ ID NO: 871 - DNA, 25 bp, Homo sapiens
tcctgtacttgtcctcagcttgggc

SEQ ID NO: 872 - DNA, 25 bp, Homo sapiens
aaatgtttccttgtgcctgctcctg

SEQ ID NO: 873 - DNA, 25 bp, Homo sapiens
aagcctatacgtttctgtggagtaa

SEQ ID NO: 874 - DNA, 25 bp, Homo sapiens
cacccagctggtcctgtggatggga

SEQ ID NO: 875 - DNA, 25 bp, Homo sapiens
aaatgtttccttgtgcctgctcctg

SEQ ID NO: 876 - DNA, 25 bp, Homo sapiens
tggaccccactggctgagaatctgg

SEQ ID NO: 877 - DNA, 25 bp, Homo sapiens
tgcctgctcctgtacttgtcctcag

SEQ ID NO: 878 - DNA, 25 bp, Homo sapiens
tccttgtgcctgctcctgtacttgt

SEQ ID NO: 879 - DNA, 25 bp, Homo sapiens
tggaccccactggctgagaatctgg

SEQ ID NO: 880 - DNA, 25 bp, Homo sapiens
aagcctatacgtttctgtggagtaa

SEQ ID NO: 881 - DNA, 25 bp, Homo sapiens
tggaccccactggctgagaatctgg

SEQ ID NO: 882 - DNA, 25 bp, Homo sapiens
tcctgtacttgtcctcagcttgggc

SEQ ID NO: 883 - DNA, 25 bp, Homo sapiens
tgcctgctcctgtacttgtcctcag

SEQ ID NO: 884 - DNA, 25 bp, Homo sapiens
gccccactggacaacactgattcct

SEQ ID NO: 885 - DNA, 25 bp, Homo sapiens
aagcctatacgtttctgtggagtaa

SEQ ID NO: 886 - DNA, 25 bp, Homo sapiens
tgcctgctcctgtacttgtcctcag

SEQ ID NO: 887 - DNA, 25 bp, Homo sapiens
gccccactggacaacactgattcct

SEQ ID NO: 888 - DNA, 25 bp, Homo sapiens
acttgtcctcagcttgggcttcttc

SEQ ID NO: 889 - DNA, 25 bp, Homo sapiens
acttgtcctcagcttgggcttcttc

SEQ ID NO: 890 - DNA, 25 bp, Homo sapiens
tggaccccactggctgagaatctgg

SEQ ID NO: 891 - DNA, 25 bp, Homo sapiens
tccttgtgcctgctcctgtacttgt

SEQ ID NO: 892 - DNA, 25 bp, Homo sapiens
tcctccatcacctgaaacactggac

SEQ ID NO: 893 - DNA, 25 bp, Homo sapiens
ttggacatctctagtgtagctgcca

SEQ ID NO: 894 - DNA, 25 bp, Homo sapiens
acttgtcctcagcttgggcttcttc

SEQ ID NO: 895 - DNA, 25 bp, Homo sapiens
tcctccatcacctgaaacactggac

SEQ ID NO: 896 - DNA, 25 bp, Homo sapiens
aaatgtttccttgtgcctgctcctg

SEQ ID NO: 897 - DNA, 25 bp, Homo sapiens
aaatgtttccttgtgcctgctcctg

SEQ ID NO: 898 - DNA, 25 bp, Homo sapiens
gccccactggacaacactgattcct

SEQ ID NO: 899 - DNA, 25 bp, Homo sapiens
tggaccccactggctgagaatctgg

SEQ ID NO: 900 - DNA, 25 bp, Homo sapiens
tggaccccactggctgagaatctgg

SEQ ID NO: 901 - DNA, 25 bp, Homo sapiens
tcctgtacttgtcctcagcttgggc

SEQ ID NO: 902 - DNA, 25 bp, Homo sapiens
aagcctatacgtttctgtggagtaa

SEQ ID NO: 903 - DNA, 25 bp, Homo sapiens
tcctgtacttgtcctcagcttgggc

SEQ ID NO: 904 - DNA, 25 bp, Homo sapiens
tcctccatcacctgaaacactggac

SEQ ID NO: 905 - DNA, 25 bp, Homo sapiens
aaatgtttccttgtgcctgctcctg

SEQ ID NO: 906 - DNA, 25 bp, Homo sapiens
cacccagctggtcctgtggatggga

SEQ ID NO: 907 - DNA, 25 bp, Homo sapiens
tggaccccactggctgagaatctgg

SEQ ID NO: 908 - DNA, 25 bp, Homo sapiens
ttggacatctctagtgtagctgcca

SEQ ID NO: 909 - DNA, 25 bp, Homo sapiens
aaatgtttccttgtgcctgctcctg

SEQ ID NO: 910 - DNA, 25 bp, Homo sapiens
tcctgtacttgtcctcagcttgggc

SEQ ID NO: 911 - DNA, 25 bp, Homo sapiens
aagcctatacgtttctgtggagtaa

SEQ ID NO: 912 - DNA, 25 bp, Homo sapiens
aaatgtttccttgtgcctgctcctg

SEQ ID NO: 913 - DNA, 25 bp, Homo sapiens
gccccactggacaacactgattcct

SEQ ID NO: 914 - DNA, 25 bp, Homo sapiens
tgcctgctcctgtacttgtcctcag

SEQ ID NO: 915 - DNA, 25 bp, Homo sapiens
tgcctgctcctgtacttgtcctcag

SEQ ID NO: 916 - DNA, 25 bp, Homo sapiens
acttgtcctcagcttgggcttcttc

SEQ ID NO: 917 - DNA, 25 bp, Homo sapiens
gccccactggacaacactgattcct

SEQ ID NO: 918 - DNA, 25 bp, Homo sapiens
acttgtcctcagcttgggcttcttc

SEQ ID NO: 919 - DNA, 25 bp, Homo sapiens
tgcctgctcctgtacttgtcctcag

SEQ ID NO: 920 - DNA, 25 bp, Homo sapiens
tgcctgctcctgtacttgtcctcag

SEQ ID NO: 921 - DNA, 25 bp, Homo sapiens
ttggacatctctagtgtagctgcca

SEQ ID NO: 922 - DNA, 25 bp, Homo sapiens
tcctgtacttgtcctcagcttgggc

SEQ ID NO: 923 - DNA, 25 bp, Homo sapiens
tccttgtgcctgctcctgtacttgt

SEQ ID NO: 924 - DNA, 25 bp, Homo sapiens
tgcctgctcctgtacttgtcctcag

SEQ ID NO: 925 - DNA, 25 bp, Homo sapiens
gccccactggacaacactgattcct

SEQ ID NO: 926 - DNA, 25 bp, Homo sapiens
tcctgtacttgtcctcagcttgggc

SEQ ID NO: 927 - DNA, 25 bp, Homo sapiens
tgcctgctcctgtacttgtcctcag

SEQ ID NO: 928 - DNA, 25 bp, Homo sapiens
ttggacatctctagtgtagctgcca

SEQ ID NO: 929 - DNA, 25 bp, Homo sapiens
acttgtcctcagcttgggcttcttc

SEQ ID NO: 930 - DNA, 25 bp, Homo sapiens
tggaccccactggctgagaatctgg

SEQ ID NO: 931 - DNA, 25 bp, Homo sapiens
tgcctgctcctgtacttgtcctcag

SEQ ID NO: 932 - DNA, 25 bp, Homo sapiens
tgcctgctcctgtacttgtcctcag

SEQ ID NO: 933 - DNA, 25 bp, Homo sapiens
cacccagctggtcctgtggatggga

SEQ ID NO: 934 - DNA, 25 bp, Homo sapiens
tccttgtgcctgctcctgtacttgt

SEQ ID NO: 935 - DNA, 25 bp, Homo sapiens
tccttgtgcctgctcctgtacttgt

SEQ ID NO: 936 - DNA, 25 bp, Homo sapiens
aaatgtttccttgtgcctgctcctg

SEQ ID NO: 937 - DNA, 25 bp, Homo sapiens
aaatgtttccttgtgcctgctcctg

SEQ ID NO: 938 - DNA, 25 bp, Homo sapiens
tccttgtgcctgctcctgtacttgt

SEQ ID NO: 939 - DNA, 25 bp, Homo sapiens
tgcctgctcctgtacttgtcctcag

SEQ ID NO: 940 - DNA, 25 bp, Homo sapiens
tgcctgctcctgtacttgtcctcag

SEQ ID NO: 941 - DNA, 25 bp, Homo sapiens
aaatgtttccttgtgcctgctcctg

SEQ ID NO: 942 - DNA, 25 bp, Homo sapiens
cacccagctggtcctgtggatggga

SEQ ID NO: 943 - DNA, 25 bp, Homo sapiens
tcctccatcacctgaaacactggac

SEQ ID NO: 944 - DNA, 25 bp, Homo sapiens
cacccagctggtcctgtggatggga

SEQ ID NO: 945 - DNA, 25 bp, Homo sapiens
tccttgtgcctgctcctgtacttgt

SEQ ID NO: 946 - DNA, 25 bp, Homo sapiens
acttgtcctcagcttgggcttcttc

SEQ ID NO: 947 - DNA, 25 bp, Homo sapiens
cacccagctggtcctgtggatggga

SEQ ID NO: 948 - DNA, 25 bp, Homo sapiens
aagcctatacgtttctgtggagtaa

SEQ ID NO: 949 - DNA, 25 bp, Homo sapiens
gccccactggacaacactgattcct

SEQ ID NO: 950 - DNA, 25 bp, Homo sapiens
tggaccccactggctgagaatctgg

SEQ ID NO: 951 - DNA, 25 bp, Homo sapiens
aaatgtttccttgtgcctgctcctg

SEQ ID NO: 952 - DNA, 25 bp, Homo sapiens
tgcctgctcctgtacttgtcctcag

SEQ ID NO: 953 - DNA, 25 bp, Homo sapiens
ttggacatctctagtgtagctgcca

SEQ ID NO: 954 - DNA, 25 bp, Homo sapiens
cacccagctggtcctgtggatggga

SEQ ID NO: 955 - DNA, 25 bp, Homo sapiens
aagcctatacgtttctgtggagtaa

SEQ ID NO: 956 - DNA, 25 bp, Homo sapiens
gccccactggacaacactgattcct

SEQ ID NO: 957 - DNA, 25 bp, Homo sapiens
aaatgtttccttgtgcctgctcctg

SEQ ID NO: 958 - DNA, 25 bp, Homo sapiens
aaatgtttccttgtgcctgctcctg

SEQ ID NO: 959 - DNA, 25 bp, Homo sapiens
cacccagctggtcctgtggatggga

SEQ ID NO: 960 - DNA, 25 bp, Homo sapiens
tggaccccactggctgagaatctgg

SEQ ID NO: 961 - DNA, 25 bp, Homo sapiens
acttgtcctcagcttgggcttcttc

SEQ ID NO: 962 - DNA, 25 bp, Homo sapiens
tgcctgctcctgtacttgtcctcag

SEQ ID NO: 963 - DNA, 25 bp, Homo sapiens
tccttgtgcctgctcctgtacttgt

SEQ ID NO: 964 - DNA, 25 bp, Homo sapiens
cacccagctggtcctgtggatggga

SEQ ID NO: 965 - DNA, 25 bp, Homo sapiens
aagcctatacgtttctgtggagtaa

SEQ ID NO: 966 - DNA, 25 bp, Homo sapiens
tgcctgctcctgtacttgtcctcag

SEQ ID NO: 967 - DNA, 25 bp, Homo sapiens
tcctccatcacctgaaacactggac

SEQ ID NO: 968 - DNA, 25 bp, Homo sapiens
tcctccatcacctgaaacactggac

SEQ ID NO: 969 - DNA, 25 bp, Homo sapiens
cacccagctggtcctgtggatggga

SEQ ID NO: 970 - DNA, 25 bp, Homo sapiens
tcctgtacttgtcctcagcttgggc

SEQ ID NO: 971 - DNA, 25 bp, Homo sapiens
tcctgtacttgtcctcagcttgggc

SEQ ID NO: 972 - DNA, 25 bp, Homo sapiens
aagcctatacgtttctgtggagtaa

SEQ ID NO: 973 - DNA, 25 bp, Homo sapiens
ttggacatctctagtgtagctgcca

SEQ ID NO: 974 - DNA, 25 bp, Homo sapiens
tcctgtacttgtcctcagcttgggc

SEQ ID NO: 975 - DNA, 25 bp, Homo sapiens
aaatgtttccttgtgcctgctcctg

SEQ ID NO: 976 - DNA, 25 bp, Homo sapiens
gccccactggacaacactgattcct

SEQ ID NO: 977 - DNA, 25 bp, Homo sapiens
acttgtcctcagcttgggcttcttc

SEQ ID NO: 978 - DNA, 25 bp, Homo sapiens
aagcctatacgtttctgtggagtaa

SEQ ID NO: 979 - DNA, 25 bp, Homo sapiens
ttggacatctctagtgtagctgcca

SEQ ID NO: 980 - DNA, 25 bp, Homo sapiens
ttggacatctctagtgtagctgcca

SEQ ID NO: 981 - DNA, 25 bp, Homo sapiens
tggaccccactggctgagaatctgg

SEQ ID NO: 982 - DNA, 25 bp, Homo sapiens
ttggacatctctagtgtagctgcca

SEQ ID NO: 983 - DNA, 25 bp, Homo sapiens
gccccactggacaacactgattcct

SEQ ID NO: 984 - DNA, 25 bp, Homo sapiens
tcctccatcacctgaaacactggac

SEQ ID NO: 985 - DNA, 25 bp, Homo sapiens
tgcctgctcctgtacttgtcctcag

SEQ ID NO: 986 - DNA, 25 bp, Homo sapiens
tgcctgctcctgtacttgtcctcag

SEQ ID NO: 987 - DNA, 25 bp, Homo sapiens
cacccagctggtcctgtggatggga

SEQ ID NO: 988 - DNA, 25 bp, Homo sapiens
cacccagctggtcctgtggatggga

SEQ ID NO: 989 - DNA, 25 bp, Homo sapiens
ttggacatctctagtgtagctgcca

SEQ ID NO: 990 - DNA, 25 bp, Homo sapiens
ttggacatctctagtgtagctgcca

SEQ ID NO: 991 - DNA, 25 bp, Homo sapiens
gccccactggacaacactgattcct

SEQ ID NO: 992 - DNA, 25 bp, Homo sapiens
gccccactggacaacactgattcct

SEQ ID NO: 993 - DNA, 25 bp, Homo sapiens
ttggacatctctagtgtagctgcca

SEQ ID NO: 994 - DNA, 25 bp, Homo sapiens
aaatgtttccttgtgcctgctcctg

SEQ ID NO: 995 - DNA, 25 bp, Homo sapiens
tcctccatcacctgaaacactggac

SEQ ID NO: 996 - DNA, 25 bp, Homo sapiens
tgcctgctcctgtacttgtcctcag

SEQ ID NO: 997 - DNA, 25 bp, Homo sapiens
tcctgtacttgtcctcagcttgggc

SEQ ID NO: 998 - DNA, 25 bp, Homo sapiens
aagcctatacgtttctgtggagtaa

SEQ ID NO: 999 - DNA, 25 bp, Homo sapiens
tggaccccactggctgagaatctgg

SEQ ID NO: 1000 - DNA, 25 bp, Homo sapiens
acttgtcctcagcttgggcttcttc

SEQ ID NO: 1001 - DNA, 25 bp, Homo sapiens
ttggacatctctagtgtagctgcca

SEQ ID NO: 1002 - DNA, 25 bp, Homo sapiens
gccccactggacaacactgattcct

SEQ ID NO: 1003 - DNA, 25 bp, Homo sapiens
gccccactggacaacactgattcct

SEQ ID NO: 1004 - DNA, 25 bp, Homo sapiens
tcctccatcacctgaaacactggac

SEQ ID NO: 1005 - DNA, 25 bp, Homo sapiens
cacccagctggtcctgtggatggga

SEQ ID NO: 1006 - DNA, 25 bp, Homo sapiens
tcctgtacttgtcctcagcttgggc

SEQ ID NO: 1007 - DNA, 25 bp, Homo sapiens
tcctgtacttgtcctcagcttgggc

SEQ ID NO: 1008 - DNA, 25 bp, Homo sapiens
tcctccatcacctgaaacactggac

SEQ ID NO: 1009 - DNA, 25 bp, Homo sapiens
cacccagctggtcctgtggatggga

SEQ ID NO: 1010 - DNA, 25 bp, Homo sapiens
acttgtcctcagcttgggcttcttc

SEQ ID NO: 1011 - DNA, 25 bp, Homo sapiens
ttggacatctctagtgtagctgcca

SEQ ID NO: 1012 - DNA, 25 bp, Homo sapiens
cacccagctggtcctgtggatggga

SEQ ID NO: 1013 - DNA, 25 bp, Homo sapiens
aagcctatacgtttctgtggagtaa

SEQ ID NO: 1014 - DNA, 25 bp, Homo sapiens
tgcctgctcctgtacttgtcctcag

SEQ ID NO: 1015 - DNA, 25 bp, Homo sapiens
gccccactggacaacactgattcct

SEQ ID NO: 1016 - DNA, 25 bp, Homo sapiens
tggaccccactggctgagaatctgg

SEQ ID NO: 1017 - DNA, 25 bp, Homo sapiens
tccttgtgcctgctcctgtacttgt

SEQ ID NO: 1018 - DNA, 25 bp, Homo sapiens
tcctgtacttgtcctcagcttgggc

SEQ ID NO: 1019 - DNA, 25 bp, Homo sapiens
tccttgtgcctgctcctgtacttgt

SEQ ID NO: 1020 - DNA, 25 bp, Homo sapiens
tccttgtgcctgctcctgtacttgt

SEQ ID NO: 1021 - DNA, 25 bp, Homo sapiens
ttggacatctctagtgtagctgcca

SEQ ID NO: 1022 - DNA, 25 bp, Homo sapiens
tcctgtacttgtcctcagcttgggc

SEQ ID NO: 1023 - DNA, 25 bp, Homo sapiens
gccccactggacaacactgattcct

SEQ ID NO: 1024 - DNA, 25 bp, Homo sapiens
acttgtcctcagcttgggcttcttc

SEQ ID NO: 1025 - DNA, 25 bp, Homo sapiens
tcctccatcacctgaaacactggac

SEQ ID NO: 1026 - DNA, 25 bp, Homo sapiens
aagcctatacgtttctgtggagtaa

SEQ ID NO: 1027 - DNA, 25 bp, Homo sapiens
tgcctgctcctgtacttgtcctcag

SEQ ID NO: 1028 - DNA, 25 bp, Homo sapiens
aaatgtttccttgtgcctgctcctg

SEQ ID NO: 1029 - DNA, 25 bp, Homo sapiens
tccttgtgcctgctcctgtacttgt

SEQ ID NO: 1030 - DNA, 25 bp, Homo sapiens
tcctccatcacctgaaacactggac

SEQ ID NO: 1031 - DNA, 25 bp, Homo sapiens
cacccagctggtcctgtggatggga

SEQ ID NO: 1032 - DNA, 25 bp, Homo sapiens
tgcctgctcctgtacttgtcctcag

SEQ ID NO: 1033 - DNA, 25 bp, Homo sapiens
cacccagctggtcctgtggatggga

SEQ ID NO: 1034 - DNA, 25 bp, Homo sapiens
acttgtcctcagcttgggcttcttc

SEQ ID NO: 1035 - DNA, 25 bp, Homo sapiens
tggaccccactggctgagaatctgg

SEQ ID NO: 1036 - DNA, 25 bp, Homo sapiens
gccccactggacaacactgattcct

SEQ ID NO: 1037 - DNA, 25 bp, Homo sapiens
acttgtcctcagcttgggcttcttc

SEQ ID NO: 1038 - DNA, 25 bp, Homo sapiens
acttgtcctcagcttgggcttcttc

SEQ ID NO: 1039 - DNA, 25 bp, Homo sapiens
aaatgtttccttgtgcctgctcctg

SEQ ID NO: 1040 - DNA, 25 bp, Homo sapiens
tccttgtgcctgctcctgtacttgt

SEQ ID NO: 1041 - DNA, 25 bp, Homo sapiens
tccttgtgcctgctcctgtacttgt

SEQ ID NO: 1042 - DNA, 25 bp, Homo sapiens
gccccactggacaacactgattcct

SEQ ID NO: 1043 - DNA, 25 bp, Homo sapiens
acttgtcctcagcttgggcttcttc

SEQ ID NO: 1044 - DNA, 25 bp, Homo sapiens
cacccagctggtcctgtggatggga

SEQ ID NO: 1045 - DNA, 25 bp, Homo sapiens
tgcctgctcctgtacttgtcctcag

SEQ ID NO: 1046 - DNA, 25 bp, Homo sapiens
tccttgtgcctgctcctgtacttgt

SEQ ID NO: 1047 - DNA, 25 bp, Homo sapiens
ttggacatctctagtgtagctgcca

SEQ ID NO: 1048 - DNA, 25 bp, Homo sapiens
gccccactggacaacactgattcct

SEQ ID NO: 1049 - DNA, 25 bp, Homo sapiens
tcctccatcacctgaaacactggac

SEQ ID NO: 1050 - DNA, 25 bp, Homo sapiens
tcctccatcacctgaaacactggac

SEQ ID NO: 1051 - DNA, 25 bp, Homo sapiens
ttggacatctctagtgtagctgcca

SEQ ID NO: 1052 - DNA, 25 bp, Homo sapiens
tcctccatcacctgaaacactggac

SEQ ID NO: 1053 - DNA, 25 bp, Homo sapiens
gccccactggacaacactgattcct

SEQ ID NO: 1054 - DNA, 25 bp, Homo sapiens
tgcctgctcctgtacttgtcctcag

SEQ ID NO: 1055 - DNA, 25 bp, Homo sapiens
aaatgtttccttgtgcctgctcctg

SEQ ID NO: 1056 - DNA, 25 bp, Homo sapiens
tggaccccactggctgagaatctgg

SEQ ID NO: 1057 - DNA, 25 bp, Homo sapiens
gccccactggacaacactgattcct

SEQ ID NO: 1058 - DNA, 25 bp, Homo sapiens
tgcctgctcctgtacttgtcctcag

SEQ ID NO: 1059 - DNA, 25 bp, Homo sapiens
aagcctatacgtttctgtggagtaa

SEQ ID NO: 1060 - DNA, 25 bp, Homo sapiens
tggaccccactggctgagaatctgg

SEQ ID NO: 1061 - DNA, 25 bp, Homo sapiens
tcctgtacttgtcctcagcttgggc

SEQ ID NO: 1062 - DNA, 25 bp, Homo sapiens
tgcctgctcctgtacttgtcctcag

SEQ ID NO: 1063 - DNA, 25 bp, Homo sapiens
aagcctatacgtttctgtggagtaa

SEQ ID NO: 1064 - DNA, 25 bp, Homo sapiens
aagcctatacgtttctgtggagtaa

SEQ ID NO: 1065 - DNA, 25 bp, Homo sapiens
acttgtcctcagcttgggcttcttc

SEQ ID NO: 1066 - DNA, 25 bp, Homo sapiens
tcctccatcacctgaaacactggac

SEQ ID NO: 1067 - DNA, 25 bp, Homo sapiens
tcctccatcacctgaaacactggac

SEQ ID NO: 1068 - DNA, 25 bp, Homo sapiens
tgcctgctcctgtacttgtcctcag

SEQ ID NO: 1069 - DNA, 25 bp, Homo sapiens
ttggacatctctagtgtagctgcca

SEQ ID NO: 1070 - DNA, 25 bp, Homo sapiens
acttgtcctcagcttgggcttcttc

SEQ ID NO: 1071 - DNA, 25 bp, Homo sapiens
ttggacatctctagtgtagctgcca

SEQ ID NO: 1072 - DNA, 25 bp, Homo sapiens
tcctgtacttgtcctcagcttgggc

SEQ ID NO: 1073 - DNA, 25 bp, Homo sapiens
tcctgtacttgtcctcagcttgggc

SEQ ID NO: 1074 - DNA, 25 bp, Homo sapiens
gccccactggacaacactgattcct

SEQ ID NO: 1075 - DNA, 25 bp, Homo sapiens
tggaccccactggctgagaatctgg

SEQ ID NO: 1076 - DNA, 25 bp, Homo sapiens
acttgtcctcagcttgggcttcttc

SEQ ID NO: 1077 - DNA, 25 bp, Homo sapiens
tggaccccactggctgagaatctgg

SEQ ID NO: 1078 - DNA, 25 bp, Homo sapiens
tcctgtacttgtcctcagcttgggc

SEQ ID NO: 1079 - DNA, 25 bp, Homo sapiens
gccccactggacaacactgattcct

SEQ ID NO: 1080 - DNA, 25 bp, Homo sapiens
aaatgtttccttgtgcctgctcctg

SEQ ID NO: 1081 - DNA, 25 bp, Homo sapiens
cacccagctggtcctgtggatggga

SEQ ID NO: 1082 - DNA, 25 bp, Homo sapiens
aaatgtttccttgtgcctgctcctg

SEQ ID NO: 1083 - DNA, 25 bp, Homo sapiens
ttggacatctctagtgtagctgcca

SEQ ID NO: 1084 - DNA, 25 bp, Homo sapiens
ttggacatctctagtgtagctgcca

SEQ ID NO: 1085 - DNA, 25 bp, Homo sapiens
ttggacatctctagtgtagctgcca

SEQ ID NO: 1086 - DNA, 25 bp, Homo sapiens
aagcctatacgtttctgtggagtaa

SEQ ID NO: 1087 - DNA, 25 bp, Homo sapiens
tgcctgctcctgtacttgtcctcag

SEQ ID NO: 1088 - DNA, 25 bp, Homo sapiens
tccttgtgcctgctcctgtacttgt

SEQ ID NO: 1089 - DNA, 25 bp, Homo sapiens
tggaccccactggctgagaatctgg

SEQ ID NO: 1090 - DNA, 25 bp, Homo sapiens
gccccactggacaacactgattcct

SEQ ID NO: 1091 - DNA, 25 bp, Homo sapiens
aagcctatacgtttctgtggagtaa

SEQ ID NO: 1092 - DNA, 25 bp, Homo sapiens
tcctccatcacctgaaacactggac

SEQ ID NO: 1093 - DNA, 25 bp, Homo sapiens
acttgtcctcagcttgggcttcttc

SEQ ID NO: 1094 - DNA, 25 bp, Homo sapiens
tgcctgctcctgtacttgtcctcag

SEQ ID NO: 1095 - DNA, 25 bp, Homo sapiens
tcctccatcacctgaaacactggac

SEQ ID NO: 1096 - DNA, 25 bp, Homo sapiens
tcctccatcacctgaaacactggac

SEQ ID NO: 1097 - DNA, 25 bp, Homo sapiens
acttgtcctcagcttgggcttcttc

SEQ ID NO: 1098 - DNA, 25 bp, Homo sapiens
tcctccatcacctgaaacactggac

SEQ ID NO: 1099 - DNA, 25 bp, Homo sapiens
ttggacatctctagtgtagctgcca

SEQ ID NO: 1100 - DNA, 25 bp, Homo sapiens
aaatgtttccttgtgcctgctcctg

SEQ ID NO: 1101 - DNA, 25 bp, Homo sapiens
tggaccccactggctgagaatctgg

SEQ ID NO: 1102 - DNA, 25 bp, Homo sapiens
tgcctgctcctgtacttgtcctcag

SEQ ID NO: 1103 - DNA, 25 bp, Homo sapiens
aaatgtttccttgtgcctgctcctg

SEQ ID NO: 1104 - DNA, 25 bp, Homo sapiens
tcctccatcacctgaaacactggac

SEQ ID NO: 1105 - DNA, 25 bp, Homo sapiens
tcctccatcacctgaaacactggac

SEQ ID NO: 1106 - DNA, 25 bp, Homo sapiens
acttgtcctcagcttgggcttcttc

SEQ ID NO: 1107 - DNA, 25 bp, Homo sapiens
tccttgtgcctgctcctgtacttgt

SEQ ID NO: 1108 - DNA, 25 bp, Homo sapiens
aaatgtttccttgtgcctgctcctg

SEQ ID NO: 1109 - DNA, 25 bp, Homo sapiens
cacccagctggtcctgtggatggga

SEQ ID NO: 1110 - DNA, 25 bp, Homo sapiens
aagcctatacgtttctgtggagtaa

SEQ ID NO: 1111 - DNA, 25 bp, Homo sapiens
tcctgtacttgtcctcagcttgggc

SEQ ID NO: 1112 - DNA, 25 bp, Homo sapiens
aagcctatacgtttctgtggagtaa

SEQ ID NO: 1113 - DNA, 25 bp, Homo sapiens
ttggacatctctagtgtagctgcca

SEQ ID NO: 1114 - DNA, 25 bp, Homo sapiens
aagcctatacgtttctgtggagtaa

SEQ ID NO: 1115 - DNA, 25 bp, Homo sapiens
acttgtcctcagcttgggcttcttc

SEQ ID NO: 1116 - DNA, 25 bp, Homo sapiens
tggaccccactggctgagaatctgg

SEQ ID NO: 1117 - DNA, 25 bp, Homo sapiens
tgcctgctcctgtacttgtcctcag

SEQ ID NO: 1118 - DNA, 25 bp, Homo sapiens
tcctgtacttgtcctcagcttgggc

SEQ ID NO: 1119 - DNA, 25 bp, Homo sapiens
tgcctgctcctgtacttgtcctcag

SEQ ID NO: 1120 - DNA, 25 bp, Homo sapiens
aaatgtttccttgtgcctgctcctg

SEQ ID NO: 1121 - DNA, 25 bp, Homo sapiens
tgcctgctcctgtacttgtcctcag

SEQ ID NO: 1122 - DNA, 25 bp, Homo sapiens
ttggacatctctagtgtagctgcca

SEQ ID NO: 1123 - DNA, 25 bp, Homo sapiens
cacccagctggtcctgtggatggga

SEQ ID NO: 1124 - DNA, 25 bp, Homo sapiens
acttgtcctcagcttgggcttcttc

SEQ ID NO: 1125 - DNA, 25 bp, Homo sapiens
tcctccatcacctgaaacactggac

SEQ ID NO: 1126 - DNA, 25 bp, Homo sapiens
tcctgtacttgtcctcagcttgggc

SEQ ID NO: 1127 - DNA, 25 bp, Homo sapiens
tggaccccactggctgagaatctgg

SEQ ID NO: 1128 - DNA, 25 bp, Homo sapiens
aagcctatacgtttctgtggagtaa

SEQ ID NO: 1129 - DNA, 25 bp, Homo sapiens
tccttgtgcctgctcctgtacttgt

SEQ ID NO: 1130 - DNA, 25 bp, Homo sapiens
aagcctatacgtttctgtggagtaa

SEQ ID NO: 1131 - DNA, 25 bp, Homo sapiens
aaatgtttccttgtgcctgctcctg

SEQ ID NO: 1132 - DNA, 25 bp, Homo sapiens
gccccactggacaacactgattcct

SEQ ID NO: 1133 - DNA, 25 bp, Homo sapiens
acttgtcctcagcttgggcttcttc

SEQ ID NO: 1134 - DNA, 25 bp, Homo sapiens
tcctccatcacctgaaacactggac

SEQ ID NO: 1135 - DNA, 25 bp, Homo sapiens
ttggacatctctagtgtagctgcca

SEQ ID NO: 1136 - DNA, 25 bp, Homo sapiens
aagcctatacgtttctgtggagtaa

SEQ ID NO: 1137 - DNA, 25 bp, Homo sapiens
aagcctatacgtttctgtggagtaa

SEQ ID NO: 1138 - DNA, 25 bp, Homo sapiens
ttggacatctctagtgtagctgcca

SEQ ID NO: 1139 - DNA, 25 bp, Homo sapiens
tcctccatcacctgaaacactggac

SEQ ID NO: 1140 - DNA, 25 bp, Homo sapiens
tcctgtacttgtcctcagcttgggc

SEQ ID NO: 1141 - DNA, 25 bp, Homo sapiens
aagcctatacgtttctgtggagtaa

SEQ ID NO: 1142 - DNA, 25 bp, Homo sapiens
gccccactggacaacactgattcct

SEQ ID NO: 1143 - DNA, 25 bp, Homo sapiens
tccttgtgcctgctcctgtacttgt

SEQ ID NO: 1144 - DNA, 25 bp, Homo sapiens
tgcctgctcctgtacttgtcctcag

SEQ ID NO: 1145 - DNA, 25 bp, Homo sapiens
aaatgtttccttgtgcctgctcctg

SEQ ID NO: 1146 - DNA, 25 bp, Homo sapiens
gccccactggacaacactgattcct

SEQ ID NO: 1147 - DNA, 25 bp, Homo sapiens
tggaccccactggctgagaatctgg

SEQ ID NO: 1148 - DNA, 25 bp, Homo sapiens
tccttgtgcctgctcctgtacttgt

SEQ ID NO: 1149 - DNA, 25 bp, Homo sapiens
acttgtcctcagcttgggcttcttc

SEQ ID NO: 1150 - DNA, 25 bp, Homo sapiens
cacccagctggtcctgtggatggga

SEQ ID NO: 1151 - DNA, 25 bp, Homo sapiens
tgcctgctcctgtacttgtcctcag

SEQ ID NO: 1152 - DNA, 25 bp, Homo sapiens
aagcctatacgtttctgtggagtaa

SEQ ID NO: 1153 - DNA, 25 bp, Homo sapiens
ttggacatctctagtgtagctgcca

SEQ ID NO: 1154 - DNA, 25 bp, Homo sapiens
aagcctatacgtttctgtggagtaa

SEQ ID NO: 1155 - DNA, 25 bp, Homo sapiens
acttgtcctcagcttgggcttcttc

SEQ ID NO: 1156 - DNA, 25 bp, Homo sapiens
acttgtcctcagcttgggcttcttc

SEQ ID NO: 1157 - DNA, 25 bp, Homo sapiens
tgcctgctcctgtacttgtcctcag

SEQ ID NO: 1158 - DNA, 25 bp, Homo sapiens
tcctccatcacctgaaacactggac

SEQ ID NO: 1159 - DNA, 25 bp, Homo sapiens
tcctgtacttgtcctcagcttgggc

SEQ ID NO: 1160 - DNA, 25 bp, Homo sapiens
gccccactggacaacactgattcct

SEQ ID NO: 1161 - DNA, 25 bp, Homo sapiens
tggaccccactggctgagaatctgg

SEQ ID NO: 1162 - DNA, 25 bp, Homo sapiens
tcctgtacttgtcctcagcttgggc

SEQ ID NO: 1163 - DNA, 25 bp, Homo sapiens
tcctgtacttgtcctcagcttgggc

SEQ ID NO: 1164 - DNA, 25 bp, Homo sapiens
tcctgtacttgtcctcagcttgggc

SEQ ID NO: 1165 - DNA, 25 bp, Homo sapiens
acttgtcctcagcttgggcttcttc

SEQ ID NO: 1166 - DNA, 25 bp, Homo sapiens
tcctgtacttgtcctcagcttgggc

SEQ ID NO: 1167 - DNA, 25 bp, Homo sapiens
tccttgtgcctgctcctgtacttgt

SEQ ID NO: 1168 - DNA, 25 bp, Homo sapiens
tcctccatcacctgaaacactggac

SEQ ID NO: 1169 - DNA, 25 bp, Homo sapiens
aaatgtttccttgtgcctgctcctg

SEQ ID NO: 1170 - DNA, 25 bp, Homo sapiens
tgcctgctcctgtacttgtcctcag

SEQ ID NO: 1171 - DNA, 25 bp, Homo sapiens
acttgtcctcagcttgggcttcttc

SEQ ID NO: 1172 - DNA, 25 bp, Homo sapiens
tgcctgctcctgtacttgtcctcag

SEQ ID NO: 1173 - DNA, 25 bp, Homo sapiens
cacccagctggtcctgtggatggga

SEQ ID NO: 1174 - DNA, 25 bp, Homo sapiens
aagcctatacgtttctgtggagtaa

SEQ ID NO: 1175 - DNA, 25 bp, Homo sapiens
gccccactggacaacactgattcct

SEQ ID NO: 1176 - DNA, 25 bp, Homo sapiens
tcctccatcacctgaaacactggac

SEQ ID NO: 1177 - DNA, 25 bp, Homo sapiens
tggaccccactggctgagaatctgg

SEQ ID NO: 1178 - DNA, 25 bp, Homo sapiens
aagcctatacgtttctgtggagtaa

SEQ ID NO: 1179 - DNA, 25 bp, Homo sapiens
aaatgtttccttgtgcctgctcctg

SEQ ID NO: 1180 - DNA, 25 bp, Homo sapiens
tggaccccactggctgagaatctgg

SEQ ID NO: 1181 - DNA, 25 bp, Homo sapiens
tccttgtgcctgctcctgtacttgt

SEQ ID NO: 1182 - DNA, 25 bp, Homo sapiens
aagcctatacgtttctgtggagtaa

SEQ ID NO: 1183 - DNA, 25 bp, Homo sapiens
aagcctatacgtttctgtggagtaa

SEQ ID NO: 1184 - DNA, 25 bp, Homo sapiens
aaatgtttccttgtgcctgctcctg

SEQ ID NO: 1185 - DNA, 25 bp, Homo sapiens
tggaccccactggctgagaatctgg

SEQ ID NO: 1186 - DNA, 25 bp, Homo sapiens
tggaccccactggctgagaatctgg

SEQ ID NO: 1187 - DNA, 25 bp, Homo sapiens
tcctgtacttgtcctcagcttgggc

SEQ ID NO: 1188 - DNA, 25 bp, Homo sapiens
tcctgtacttgtcctcagcttgggc

SEQ ID NO: 1189 - DNA, 25 bp, Homo sapiens
gccccactggacaacactgattcct

SEQ ID NO: 1190 - DNA, 25 bp, Homo sapiens
tcctgtacttgtcctcagcttgggc

SEQ ID NO: 1191 - DNA, 25 bp, Homo sapiens
gccccactggacaacactgattcct

SEQ ID NO: 1192 - DNA, 25 bp, Homo sapiens
aaatgtttccttgtgcctgctcctg

SEQ ID NO: 1193 - DNA, 25 bp, Homo sapiens
tgcctgctcctgtacttgtcctcag

SEQ ID NO: 1194 - DNA, 25 bp, Homo sapiens
tcctgtacttgtcctcagcttgggc

SEQ ID NO: 1195 - DNA, 25 bp, Homo sapiens
gccccactggacaacactgattcct

SEQ ID NO: 1196 - DNA, 25 bp, Homo sapiens
tcctccatcacctgaaacactggac

SEQ ID NO: 1197 - DNA, 25 bp, Homo sapiens
tcctgtacttgtcctcagcttgggc

SEQ ID NO: 1198 - DNA, 25 bp, Homo sapiens
tgcctgctcctgtacttgtcctcag

SEQ ID NO: 1199 - DNA, 25 bp, Homo sapiens
acttgtcctcagcttgggcttcttc

SEQ ID NO: 1200 - DNA, 25 bp, Homo sapiens
tcctccatcacctgaaacactggac

SEQ ID NO: 1201 - DNA, 25 bp, Homo sapiens
ttggacatctctagtgtagctgcca

SEQ ID NO: 1202 - DNA, 25 bp, Homo sapiens
cacccagctggtcctgtggatggga

SEQ ID NO: 1203 - DNA, 25 bp, Homo sapiens
tgcctgctcctgtacttgtcctcag

SEQ ID NO: 1204 - DNA, 25 bp, Homo sapiens
tggaccccactggctgagaatctgg

SEQ ID NO: 1205 - DNA, 25 bp, Homo sapiens
acttgtcctcagcttgggcttcttc

SEQ ID NO: 1206 - DNA, 25 bp, Homo sapiens
ttggacatctctagtgtagctgcca

SEQ ID NO: 1207 - DNA, 25 bp, Homo sapiens
acttgtcctcagcttgggcttcttc

SEQ ID NO: 1208 - DNA, 25 bp, Homo sapiens
acttgtcctcagcttgggcttcttc

SEQ ID NO: 1209 - DNA, 25 bp, Homo sapiens
tgcctgctcctgtacttgtcctcag

SEQ ID NO: 1210 - DNA, 25 bp, Homo sapiens
tggaccccactggctgagaatctgg

SEQ ID NO: 1211 - DNA, 25 bp, Homo sapiens
tcctgtacttgtcctcagcttgggc

SEQ ID NO: 1212 - DNA, 25 bp, Homo sapiens
tgcctgctcctgtacttgtcctcag

SEQ ID NO: 1213 - DNA, 25 bp, Homo sapiens
gccccactggacaacactgattcct

SEQ ID NO: 1214 - DNA, 25 bp, Homo sapiens
gccccactggacaacactgattcct

SEQ ID NO: 1215 - DNA, 25 bp, Homo sapiens
gccccactggacaacactgattcct

SEQ ID NO: 1216 - DNA, 25 bp, Homo sapiens
tggaccccactggctgagaatctgg

SEQ ID NO: 1217 - DNA, 25 bp, Homo sapiens
aagcctatacgtttctgtggagtaa

SEQ ID NO: 1218 - DNA, 25 bp, Homo sapiens
aaatgtttccttgtgcctgctcctg

SEQ ID NO: 1219 - DNA, 25 bp, Homo sapiens
tgcctgctcctgtacttgtcctcag

SEQ ID NO: 1220 - DNA, 25 bp, Homo sapiens
tgcctgctcctgtacttgtcctcag

SEQ ID NO: 1221 - DNA, 25 bp, Homo sapiens
aagcctatacgtttctgtggagtaa

SEQ ID NO: 1222 - DNA, 25 bp, Homo sapiens
tcctccatcacctgaaacactggac

SEQ ID NO: 1223 - DNA, 25 bp, Homo sapiens
aagcctatacgtttctgtggagtaa

SEQ ID NO: 1224 - DNA, 25 bp, Homo sapiens
cacccagctggtcctgtggatggga

SEQ ID NO: 1225 - DNA, 25 bp, Homo sapiens
aaatgtttccttgtgcctgctcctg

SEQ ID NO: 1226 - DNA, 25 bp, Homo sapiens
tcctccatcacctgaaacactggac

SEQ ID NO: 1227 - DNA, 25 bp, Homo sapiens
tggaccccactggctgagaatctgg

SEQ ID NO: 1228 - DNA, 25 bp, Homo sapiens
tggaccccactggctgagaatctgg

SEQ ID NO: 1229 - DNA, 25 bp, Homo sapiens
tcctccatcacctgaaacactggac

SEQ ID NO: 1230 - DNA, 25 bp, Homo sapiens
gccccactggacaacactgattcct

SEQ ID NO: 1231 - DNA, 25 bp, Homo sapiens
tcctgtacttgtcctcagcttgggc

SEQ ID NO: 1232 - DNA, 25 bp, Homo sapiens
tgcctgctcctgtacttgtcctcag

SEQ ID NO: 1233 - DNA, 25 bp, Homo sapiens
tggaccccactggctgagaatctgg

SEQ ID NO: 1234 - DNA, 25 bp, Homo sapiens
gccccactggacaacactgattcct

SEQ ID NO: 1235 - DNA, 25 bp, Homo sapiens
tccttgtgcctgctcctgtacttgt

SEQ ID NO: 1236 - DNA, 25 bp, Homo sapiens
aaatgtttccttgtgcctgctcctg

SEQ ID NO: 1237 - DNA, 25 bp, Homo sapiens
acttgtcctcagcttgggcttcttc

SEQ ID NO: 1238 - DNA, 25 bp, Homo sapiens
acttgtcctcagcttgggcttcttc

SEQ ID NO: 1239 - DNA, 25 bp, Homo sapiens
aaatgtttccttgtgcctgctcctg

SEQ ID NO: 1240 - DNA, 25 bp, Homo sapiens
tcctccatcacctgaaacactggac

SEQ ID NO: 1241 - DNA, 25 bp, Homo sapiens
acttgtcctcagcttgggcttcttc

SEQ ID NO: 1242 - DNA, 25 bp, Homo sapiens
aagcctatacgtttctgtggagtaa

SEQ ID NO: 1243 - DNA, 25 bp, Homo sapiens
tccttgtgcctgctcctgtacttgt

SEQ ID NO: 1244 - DNA, 25 bp, Homo sapiens
tcctgtacttgtcctcagcttgggc

SEQ ID NO: 1245 - DNA, 25 bp, Homo sapiens
aaatgtttccttgtgcctgctcctg

SEQ ID NO: 1246 - DNA, 25 bp, Homo sapiens
aaatgtttccttgtgcctgctcctg

SEQ ID NO: 1247 - DNA, 25 bp, Homo sapiens
tcctccatcacctgaaacactggac

SEQ ID NO: 1248 - DNA, 25 bp, Homo sapiens
tcctccatcacctgaaacactggac

SEQ ID NO: 1249 - DNA, 25 bp, Homo sapiens
tccttgtgcctgctcctgtacttgt

SEQ ID NO: 1250 - DNA, 25 bp, Homo sapiens
aagcctatacgtttctgtggagtaa

SEQ ID NO: 1251 - DNA, 25 bp, Homo sapiens
tccttgtgcctgctcctgtacttgt

SEQ ID NO: 1252 - DNA, 25 bp, Homo sapiens
tcctgtacttgtcctcagcttgggc

SEQ ID NO: 1253 - DNA, 25 bp, Homo sapiens
cacccagctggtcctgtggatggga

SEQ ID NO: 1254 - DNA, 25 bp, Homo sapiens
aagcctatacgtttctgtggagtaa

SEQ ID NO: 1255 - DNA, 25 bp, Homo sapiens
tcctgtacttgtcctcagcttgggc

SEQ ID NO: 1256 - DNA, 25 bp, Homo sapiens
acttgtcctcagcttgggcttcttc

SEQ ID NO: 1257 - DNA, 25 bp, Homo sapiens
acttgtcctcagcttgggcttcttc

SEQ ID NO: 1258 - DNA, 25 bp, Homo sapiens
tcctccatcacctgaaacactggac

SEQ ID NO: 1259 - DNA, 25 bp, Homo sapiens
acttgtcctcagcttgggcttcttc

SEQ ID NO: 1260 - DNA, 25 bp, Homo sapiens
tgcctgctcctgtacttgtcctcag

SEQ ID NO: 1261 - DNA, 25 bp, Homo sapiens
aagcctatacgtttctgtggagtaa

SEQ ID NO: 1262 - DNA, 25 bp, Homo sapiens
tcctccatcacctgaaacactggac

SEQ ID NO: 1263 - DNA, 25 bp, Homo sapiens
ttggacatctctagtgtagctgcca

SEQ ID NO: 1264 - DNA, 25 bp, Homo sapiens
tcctccatcacctgaaacactggac

SEQ ID NO: 1265 - DNA, 25 bp, Homo sapiens
tcctgtacttgtcctcagcttgggc

SEQ ID NO: 1266 - DNA, 25 bp, Homo sapiens
tggaccccactggctgagaatctgg

SEQ ID NO: 1267 - DNA, 25 bp, Homo sapiens
tccttgtgcctgctcctgtacttgt

SEQ ID NO: 1268 - DNA, 25 bp, Homo sapiens
tccttgtgcctgctcctgtacttgt

SEQ ID NO: 1269 - DNA, 25 bp, Homo sapiens
gccccactggacaacactgattcct

SEQ ID NO: 1270 - DNA, 25 bp, Homo sapiens
acttgtcctcagcttgggcttcttc

SEQ ID NO: 1271 - DNA, 25 bp, Homo sapiens
tcctgtacttgtcctcagcttgggc

SEQ ID NO: 1272 - DNA, 25 bp, Homo sapiens
tcctccatcacctgaaacactggac

SEQ ID NO: 1273 - DNA, 25 bp, Homo sapiens
acttgtcctcagcttgggcttcttc

SEQ ID NO: 1274 - DNA, 25 bp, Homo sapiens
acttgtcctcagcttgggcttcttc

SEQ ID NO: 1275 - DNA, 25 bp, Homo sapiens
acttgtcctcagcttgggcttcttc

SEQ ID NO: 1276 - DNA, 25 bp, Homo sapiens
aagcctatacgtttctgtggagtaa

SEQ ID NO: 1277 - DNA, 25 bp, Homo sapiens
ttggacatctctagtgtagctgcca

SEQ ID NO: 1278 - DNA, 25 bp, Homo sapiens
tggaccccactggctgagaatctgg

SEQ ID NO: 1279 - DNA, 25 bp, Homo sapiens
tcctgtacttgtcctcagcttgggc

SEQ ID NO: 1280 - DNA, 25 bp, Homo sapiens
tccttgtgcctgctcctgtacttgt

SEQ ID NO: 1281 - DNA, 25 bp, Homo sapiens
tgcctgctcctgtacttgtcctcag

SEQ ID NO: 1282 - DNA, 25 bp, Homo sapiens
tcctccatcacctgaaacactggac

SEQ ID NO: 1283 - DNA, 25 bp, Homo sapiens
aaatgtttccttgtgcctgctcctg

SEQ ID NO: 1284 - DNA, 25 bp, Homo sapiens
tcctgtacttgtcctcagcttgggc

SEQ ID NO: 1285 - DNA, 25 bp, Homo sapiens
cacccagctggtcctgtggatggga

SEQ ID NO: 1286 - DNA, 25 bp, Homo sapiens
cacccagctggtcctgtggatggga

SEQ ID NO: 1287 - DNA, 25 bp, Homo sapiens
tgcctgctcctgtacttgtcctcag

SEQ ID NO: 1288 - DNA, 25 bp, Homo sapiens
gccccactggacaacactgattcct

SEQ ID NO: 1289 - DNA, 25 bp, Homo sapiens
acttgtcctcagcttgggcttcttc

SEQ ID NO: 1290 - DNA, 25 bp, Homo sapiens
tgcctgctcctgtacttgtcctcag

SEQ ID NO: 1291 - DNA, 25 bp, Homo sapiens
gccccactggacaacactgattcct

SEQ ID NO: 1292 - DNA, 25 bp, Homo sapiens
acttgtcctcagcttgggcttcttc

SEQ ID NO: 1293 - DNA, 25 bp, Homo sapiens
tggaccccactggctgagaatctgg

SEQ ID NO: 1294 - DNA, 25 bp, Homo sapiens
tcctccatcacctgaaacactggac

SEQ ID NO: 1295 - DNA, 25 bp, Homo sapiens
cacccagctggtcctgtggatggga

SEQ ID NO: 1296 - DNA, 25 bp, Homo sapiens
ttggacatctctagtgtagctgcca

SEQ ID NO: 1297 - DNA, 25 bp, Homo sapiens
tcctgtacttgtcctcagcttgggc

SEQ ID NO: 1298 - DNA, 25 bp, Homo sapiens
aaatgtttccttgtgcctgctcctg

SEQ ID NO: 1299 - DNA, 25 bp, Homo sapiens
cacccagctggtcctgtggatggga

SEQ ID NO: 1300 - DNA, 25 bp, Homo sapiens
tgcctgctcctgtacttgtcctcag

SEQ ID NO: 1301 - DNA, 25 bp, Homo sapiens
aagcctatacgtttctgtggagtaa

SEQ ID NO: 1302 - DNA, 25 bp, Homo sapiens
acttgtcctcagcttgggcttcttc

SEQ ID NO: 1303 - DNA, 25 bp, Homo sapiens
tggaccccactggctgagaatctgg

SEQ ID NO: 1304 - DNA, 25 bp, Homo sapiens
tccttgtgcctgctcctgtacttgt

SEQ ID NO: 1305 - DNA, 25 bp, Homo sapiens
tcctccatcacctgaaacactggac

SEQ ID NO: 1306 - DNA, 25 bp, Homo sapiens
cacccagctggtcctgtggatggga

SEQ ID NO: 1307 - DNA, 25 bp, Homo sapiens
gccccactggacaacactgattcct

SEQ ID NO: 1308 - DNA, 25 bp, Homo sapiens
gccccactggacaacactgattcct

SEQ ID NO: 1309 - DNA, 25 bp, Homo sapiens
tcctgtacttgtcctcagcttgggc

SEQ ID NO: 1310 - DNA, 25 bp, Homo sapiens
aagcctatacgtttctgtggagtaa

SEQ ID NO: 1311 - DNA, 25 bp, Homo sapiens
ttggacatctctagtgtagctgcca

SEQ ID NO: 1312 - DNA, 25 bp, Homo sapiens
acttgtcctcagcttgggcttcttc

SEQ ID NO: 1313 - DNA, 25 bp, Homo sapiens
tccttgtgcctgctcctgtacttgt

SEQ ID NO: 1314 - DNA, 25 bp, Homo sapiens
gccccactggacaacactgattcct

SEQ ID NO: 1315 - DNA, 25 bp, Homo sapiens
tggaccccactggctgagaatctgg

SEQ ID NO: 1316 - DNA, 25 bp, Homo sapiens
acttgtcctcagcttgggcttcttc

SEQ ID NO: 1317 - DNA, 25 bp, Homo sapiens
tcctccatcacctgaaacactggac

SEQ ID NO: 1318 - DNA, 25 bp, Homo sapiens
tccttgtgcctgctcctgtacttgt

SEQ ID NO: 1319 - DNA, 25 bp, Homo sapiens
tgcctgctcctgtacttgtcctcag

SEQ ID NO: 1320 - DNA, 25 bp, Homo sapiens
aagcctatacgtttctgtggagtaa

SEQ ID NO: 1321 - DNA, 25 bp, Homo sapiens
aagcctatacgtttctgtggagtaa

SEQ ID NO: 1322 - DNA, 25 bp, Homo sapiens
aaatgtttccttgtgcctgctcctg

SEQ ID NO: 1323 - DNA, 25 bp, Homo sapiens
aagcctatacgtttctgtggagtaa

SEQ ID NO: 1324 - DNA, 25 bp, Homo sapiens
ttggacatctctagtgtagctgcca

SEQ ID NO: 1325 - DNA, 25 bp, Homo sapiens
tcctccatcacctgaaacactggac

SEQ ID NO: 1326 - DNA, 25 bp, Homo sapiens
tggaccccactggctgagaatctgg

SEQ ID NO: 1327 - DNA, 25 bp, Homo sapiens
aagcctatacgtttctgtggagtaa

SEQ ID NO: 1328 - DNA, 25 bp, Homo sapiens
ttggacatctctagtgtagctgcca

SEQ ID NO: 1329 - DNA, 25 bp, Homo sapiens
aaatgtttccttgtgcctgctcctg

SEQ ID NO: 1330 - DNA, 25 bp, Homo sapiens
tggaccccactggctgagaatctgg

SEQ ID NO: 1331 - DNA, 25 bp, Homo sapiens
cacccagctggtcctgtggatggga

SEQ ID NO: 1332 - DNA, 25 bp, Homo sapiens
aagcctatacgtttctgtggagtaa

SEQ ID NO: 1333 - DNA, 25 bp, Homo sapiens
aaatgtttccttgtgcctgctcctg

SEQ ID NO: 1334 - DNA, 25 bp, Homo sapiens
gccccactggacaacactgattcct

SEQ ID NO: 1335 - DNA, 25 bp, Homo sapiens
tgcctgctcctgtacttgtcctcag

SEQ ID NO: 1336 - DNA, 25 bp, Homo sapiens
tgcctgctcctgtacttgtcctcag

SEQ ID NO: 1337 - DNA, 25 bp, Homo sapiens
tggaccccactggctgagaatctgg

SEQ ID NO: 1338 - DNA, 25 bp, Homo sapiens
gccccactggacaacactgattcct

SEQ ID NO: 1339 - DNA, 25 bp, Homo sapiens
tgcctgctcctgtacttgtcctcag

SEQ ID NO: 1340 - DNA, 25 bp, Homo sapiens
acttgtcctcagcttgggcttcttc

SEQ ID NO: 1341 - DNA, 25 bp, Homo sapiens
tgcctgctcctgtacttgtcctcag

SEQ ID NO: 1342 - DNA, 25 bp, Homo sapiens
cacccagctggtcctgtggatggga

SEQ ID NO: 1343 - DNA, 25 bp, Homo sapiens
tccttgtgcctgctcctgtacttgt

SEQ ID NO: 1344 - DNA, 25 bp, Homo sapiens
acttgtcctcagcttgggcttcttc

SEQ ID NO: 1345 - DNA, 25 bp, Homo sapiens
gccccactggacaacactgattcct

SEQ ID NO: 1346 - DNA, 25 bp, Homo sapiens
tggaccccactggctgagaatctgg

SEQ ID NO: 1347 - DNA, 25 bp, Homo sapiens
cacccagctggtcctgtggatggga

SEQ ID NO: 1348 - DNA, 25 bp, Homo sapiens
tccttgtgcctgctcctgtacttgt

SEQ ID NO: 1349 - DNA, 25 bp, Homo sapiens
tcctccatcacctgaaacactggac

SEQ ID NO: 1350 - DNA, 25 bp, Homo sapiens
ttggacatctctagtgtagctgcca

SEQ ID NO: 1351 - DNA, 25 bp, Homo sapiens
tgcctgctcctgtacttgtcctcag

SEQ ID NO: 1352 - DNA, 25 bp, Homo sapiens
cacccagctggtcctgtggatggga

SEQ ID NO: 1353 - DNA, 25 bp, Homo sapiens
tcctccatcacctgaaacactggac

SEQ ID NO: 1354 - DNA, 25 bp, Homo sapiens
acttgtcctcagcttgggcttcttc

SEQ ID NO: 1355 - DNA, 25 bp, Homo sapiens
tccttgtgcctgctcctgtacttgt

SEQ ID NO: 1356 - DNA, 25 bp, Homo sapiens
tcctccatcacctgaaacactggac

SEQ ID NO: 1357 - DNA, 25 bp, Homo sapiens
tggaccccactggctgagaatctgg

SEQ ID NO: 1358 - DNA, 25 bp, Homo sapiens
tgcctgctcctgtacttgtcctcag

SEQ ID NO: 1359 - DNA, 25 bp, Homo sapiens
ttggacatctctagtgtagctgcca

SEQ ID NO: 1360 - DNA, 25 bp, Homo sapiens
tgcctgctcctgtacttgtcctcag

SEQ ID NO: 1361 - DNA, 25 bp, Homo sapiens
aagcctatacgtttctgtggagtaa

SEQ ID NO: 1362 - DNA, 25 bp, Homo sapiens
aaatgtttccttgtgcctgctcctg

SEQ ID NO: 1363 - DNA, 25 bp, Homo sapiens
tcctccatcacctgaaacactggac

SEQ ID NO: 1364 - DNA, 25 bp, Homo sapiens
tccttgtgcctgctcctgtacttgt

SEQ ID NO: 1365 - DNA, 25 bp, Homo sapiens
tcctgtacttgtcctcagcttgggc

SEQ ID NO: 1366 - DNA, 25 bp, Homo sapiens
tcctccatcacctgaaacactggac

SEQ ID NO: 1367 - DNA, 25 bp, Homo sapiens
tggaccccactggctgagaatctgg

SEQ ID NO: 1368 - DNA, 25 bp, Homo sapiens
tccttgtgcctgctcctgtacttgt

SEQ ID NO: 1369 - DNA, 25 bp, Homo sapiens
tcctgtacttgtcctcagcttgggc

SEQ ID NO: 1370 - DNA, 25 bp, Homo sapiens
ttggacatctctagtgtagctgcca

SEQ ID NO: 1371 - DNA, 25 bp, Homo sapiens
tcctccatcacctgaaacactggac

SEQ ID NO: 1372 - DNA, 25 bp, Homo sapiens
acttgtcctcagcttgggcttcttc

SEQ ID NO: 1373 - DNA, 25 bp, Homo sapiens
aagcctatacgtttctgtggagtaa

SEQ ID NO: 1374 - DNA, 25 bp, Homo sapiens
tggaccccactggctgagaatctgg

SEQ ID NO: 1375 - DNA, 25 bp, Homo sapiens
cacccagctggtcctgtggatggga

SEQ ID NO: 1376 - DNA, 25 bp, Homo sapiens
ttggacatctctagtgtagctgcca

SEQ ID NO: 1377 - DNA, 25 bp, Homo sapiens
tgcctgctcctgtacttgtcctcag

SEQ ID NO: 1378 - DNA, 25 bp, Homo sapiens
tggaccccactggctgagaatctgg

SEQ ID NO: 1379 - DNA, 25 bp, Homo sapiens
tccttgtgcctgctcctgtacttgt

SEQ ID NO: 1380 - DNA, 25 bp, Homo sapiens
ttggacatctctagtgtagctgcca

SEQ ID NO: 1381 - DNA, 25 bp, Homo sapiens
cacccagctggtcctgtggatggga

SEQ ID NO: 1382 - DNA, 25 bp, Homo sapiens
tcctccatcacctgaaacactggac

SEQ ID NO: 1383 - DNA, 25 bp, Homo sapiens
gccccactggacaacactgattcct

SEQ ID NO: 1384 - DNA, 25 bp, Homo sapiens
tcctccatcacctgaaacactggac

SEQ ID NO: 1385 - DNA, 25 bp, Homo sapiens
tggaccccactggctgagaatctgg

SEQ ID NO: 1386 - DNA, 25 bp, Homo sapiens
tcctgtacttgtcctcagcttgggc

SEQ ID NO: 1387 - DNA, 25 bp, Homo sapiens
gccccactggacaacactgattcct

SEQ ID NO: 1388 - DNA, 25 bp, Homo sapiens
aagcctatacgtttctgtggagtaa

SEQ ID NO: 1389 - DNA, 25 bp, Homo sapiens
ttggacatctctagtgtagctgcca

SEQ ID NO: 1390 - DNA, 25 bp, Homo sapiens
tcctgtacttgtcctcagcttgggc

SEQ ID NO: 1391 - DNA, 25 bp, Homo sapiens
tccttgtgcctgctcctgtacttgt

SEQ ID NO: 1392 - DNA, 25 bp, Homo sapiens
acttgtcctcagcttgggcttcttc

SEQ ID NO: 1393 - DNA, 25 bp, Homo sapiens
aagcctatacgtttctgtggagtaa

SEQ ID NO: 1394 - DNA, 25 bp, Homo sapiens
gccccactggacaacactgattcct

SEQ ID NO: 1395 - DNA, 25 bp, Homo sapiens
tccttgtgcctgctcctgtacttgt

SEQ ID NO: 1396 - DNA, 25 bp, Homo sapiens
tgcctgctcctgtacttgtcctcag

SEQ ID NO: 1397 - DNA, 25 bp, Homo sapiens
tcctgtacttgtcctcagcttgggc

SEQ ID NO: 1398 - DNA, 25 bp, Homo sapiens
tcctccatcacctgaaacactggac

SEQ ID NO: 1399 - DNA, 25 bp, Homo sapiens
aagcctatacgtttctgtggagtaa

SEQ ID NO: 1400 - DNA, 25 bp, Homo sapiens
cacccagctggtcctgtggatggga

SEQ ID NO: 1401 - DNA, 25 bp, Homo sapiens
gccccactggacaacactgattcct

SEQ ID NO: 1402 - DNA, 25 bp, Homo sapiens
acttgtcctcagcttgggcttcttc

SEQ ID NO: 1403 - DNA, 25 bp, Homo sapiens
cacccagctggtcctgtggatggga

SEQ ID NO: 1404 - DNA, 25 bp, Homo sapiens
cacccagctggtcctgtggatggga

SEQ ID NO: 1405 - DNA, 25 bp, Homo sapiens
tggaccccactggctgagaatctgg

SEQ ID NO: 1406 - DNA, 25 bp, Homo sapiens
acttgtcctcagcttgggcttcttc

SEQ ID NO: 1407 - DNA, 25 bp, Homo sapiens
aagcctatacgtttctgtggagtaa

SEQ ID NO: 1408 - DNA, 25 bp, Homo sapiens
gccccactggacaacactgattcct

SEQ ID NO: 1409 - DNA, 25 bp, Homo sapiens
ttggacatctctagtgtagctgcca

SEQ ID NO: 1410 - DNA, 25 bp, Homo sapiens
tggaccccactggctgagaatctgg

SEQ ID NO: 1411 - DNA, 25 bp, Homo sapiens
tcctccatcacctgaaacactggac

SEQ ID NO: 1412 - DNA, 25 bp, Homo sapiens
tccttgtgcctgctcctgtacttgt

SEQ ID NO: 1413 - DNA, 25 bp, Homo sapiens
tgcctgctcctgtacttgtcctcag

SEQ ID NO: 1414 - DNA, 25 bp, Homo sapiens
aaatgtttccttgtgcctgctcctg

SEQ ID NO: 1415 - DNA, 25 bp, Homo sapiens
ttggacatctctagtgtagctgcca

SEQ ID NO: 1416 - DNA, 25 bp, Homo sapiens
cacccagctggtcctgtggatggga

SEQ ID NO: 1417 - DNA, 25 bp, Homo sapiens
gccccactggacaacactgattcct

SEQ ID NO: 1418 - DNA, 25 bp, Homo sapiens
tccttgtgcctgctcctgtacttgt

SEQ ID NO: 1419 - DNA, 25 bp, Homo sapiens
aaatgtttccttgtgcctgctcctg

SEQ ID NO: 1420 - DNA, 25 bp, Homo sapiens
tcctgtacttgtcctcagcttgggc

SEQ ID NO: 1421 - DNA, 25 bp, Homo sapiens
tcctccatcacctgaaacactggac

SEQ ID NO: 1422 - DNA, 25 bp, Homo sapiens
tggaccccactggctgagaatctgg

SEQ ID NO: 1423 - DNA, 25 bp, Homo sapiens
acttgtcctcagcttgggcttcttc

SEQ ID NO: 1424 - DNA, 25 bp, Homo sapiens
ttggacatctctagtgtagctgcca

SEQ ID NO: 1425 - DNA, 25 bp, Homo sapiens
tcctccatcacctgaaacactggac

SEQ ID NO: 1426 - DNA, 25 bp, Homo sapiens
tcctccatcacctgaaacactggac

SEQ ID NO: 1427 - DNA, 25 bp, Homo sapiens
tgcctgctcctgtacttgtcctcag

SEQ ID NO: 1428 - DNA, 25 bp, Homo sapiens
tccttgtgcctgctcctgtacttgt

SEQ ID NO: 1429 - DNA, 25 bp, Homo sapiens
ttggacatctctagtgtagctgcca

SEQ ID NO: 1430 - DNA, 25 bp, Homo sapiens
tggaccccactggctgagaatctgg

SEQ ID NO: 1431 - DNA, 25 bp, Homo sapiens
tcctccatcacctgaaacactggac

SEQ ID NO: 1432 - DNA, 25 bp, Homo sapiens
cacccagctggtcctgtggatggga

SEQ ID NO: 1433 - DNA, 25 bp, Homo sapiens
cacccagctggtcctgtggatggga

SEQ ID NO: 1434 - DNA, 25 bp, Homo sapiens
tccttgtgcctgctcctgtacttgt

SEQ ID NO: 1435 - DNA, 25 bp, Homo sapiens
tggaccccactggctgagaatctgg

SEQ ID NO: 1436 - DNA, 25 bp, Homo sapiens
tgcctgctcctgtacttgtcctcag

SEQ ID NO: 1437 - DNA, 25 bp, Homo sapiens
aagcctatacgtttctgtggagtaa

SEQ ID NO: 1438 - DNA, 25 bp, Homo sapiens
tgcctgctcctgtacttgtcctcag

SEQ ID NO: 1439 - DNA, 25 bp, Homo sapiens
gccccactggacaacactgattcct

SEQ ID NO: 1440 - DNA, 25 bp, Homo sapiens
tcctgtacttgtcctcagcttgggc

SEQ ID NO: 1441 - DNA, 25 bp, Homo sapiens
aaatgtttccttgtgcctgctcctg

SEQ ID NO: 1442 - DNA, 25 bp, Homo sapiens
aagcctatacgtttctgtggagtaa

SEQ ID NO: 1443 - DNA, 25 bp, Homo sapiens
tggaccccactggctgagaatctgg

SEQ ID NO: 1444 - DNA, 25 bp, Homo sapiens
gccccactggacaacactgattcct

SEQ ID NO: 1445 - DNA, 25 bp, Homo sapiens
acttgtcctcagcttgggcttcttc

SEQ ID NO: 1446 - DNA, 25 bp, Homo sapiens
aagcctatacgtttctgtggagtaa

SEQ ID NO: 1447 - DNA, 25 bp, Homo sapiens
aagcctatacgtttctgtggagtaa

SEQ ID NO: 1448 - DNA, 25 bp, Homo sapiens
tcctgtacttgtcctcagcttgggc

SEQ ID NO: 1449 - DNA, 25 bp, Homo sapiens
gccccactggacaacactgattcct

SEQ ID NO: 1450 - DNA, 25 bp, Homo sapiens
tgcctgctcctgtacttgtcctcag

SEQ ID NO: 1451 - DNA, 25 bp, Homo sapiens
cacccagctggtcctgtggatggga

SEQ ID NO: 1452 - DNA, 25 bp, Homo sapiens
tcctgtacttgtcctcagcttgggc

SEQ ID NO: 1453 - DNA, 25 bp, Homo sapiens
tcctccatcacctgaaacactggac

SEQ ID NO: 1454 - DNA, 25 bp, Homo sapiens
gccccactggacaacactgattcct

SEQ ID NO: 1455 - DNA, 25 bp, Homo sapiens
tcctgtacttgtcctcagcttgggc

SEQ ID NO: 1456 - DNA, 25 bp, Homo sapiens
cacccagctggtcctgtggatggga

SEQ ID NO: 1457 - DNA, 25 bp, Homo sapiens
tccttgtgcctgctcctgtacttgt

SEQ ID NO: 1458 - DNA, 25 bp, Homo sapiens
tcctccatcacctgaaacactggac

SEQ ID NO: 1459 - DNA, 25 bp, Homo sapiens
aaatgtttccttgtgcctgctcctg

SEQ ID NO: 1460 - DNA, 25 bp, Homo sapiens
tgcctgctcctgtacttgtcctcag

SEQ ID NO: 1461 - DNA, 25 bp, Homo sapiens
aagcctatacgtttctgtggagtaa

SEQ ID NO: 1462 - DNA, 25 bp, Homo sapiens
cacccagctggtcctgtggatggga

SEQ ID NO: 1463 - DNA, 25 bp, Homo sapiens
tcctgtacttgtcctcagcttgggc

SEQ ID NO: 1464 - DNA, 25 bp, Homo sapiens
tgcctgctcctgtacttgtcctcag

SEQ ID NO: 1465 - DNA, 25 bp, Homo sapiens
tccttgtgcctgctcctgtacttgt

SEQ ID NO: 1466 - DNA, 25 bp, Homo sapiens
tggaccccactggctgagaatctgg

SEQ ID NO: 1467 - DNA, 25 bp, Homo sapiens
tgcctgctcctgtacttgtcctcag

SEQ ID NO: 1468 - DNA, 25 bp, Homo sapiens
gccccactggacaacactgattcct

SEQ ID NO: 1469 - DNA, 25 bp, Homo sapiens
tccttgtgcctgctcctgtacttgt

SEQ ID NO: 1470 - DNA, 25 bp, Homo sapiens
tccttgtgcctgctcctgtacttgt

SEQ ID NO: 1471 - DNA, 25 bp, Homo sapiens
tggaccccactggctgagaatctgg

SEQ ID NO: 1472 - DNA, 25 bp, Homo sapiens
ttggacatctctagtgtagctgcca

SEQ ID NO: 1473 - DNA, 25 bp, Homo sapiens
tcctccatcacctgaaacactggac

SEQ ID NO: 1474 - DNA, 25 bp, Homo sapiens
aaatgtttccttgtgcctgctcctg

SEQ ID NO: 1475 - DNA, 25 bp, Homo sapiens
aagcctatacgtttctgtggagtaa

SEQ ID NO: 1476 - DNA, 25 bp, Homo sapiens
gccccactggacaacactgattcct

SEQ ID NO: 1477 - DNA, 25 bp, Homo sapiens
aaatgtttccttgtgcctgctcctg

SEQ ID NO: 1478 - DNA, 25 bp, Homo sapiens
tggaccccactggctgagaatctgg

SEQ ID NO: 1479 - DNA, 25 bp, Homo sapiens
aaatgtttccttgtgcctgctcctg

SEQ ID NO: 1480 - DNA, 25 bp, Homo sapiens
cacccagctggtcctgtggatggga

SEQ ID NO: 1481 - DNA, 25 bp, Homo sapiens
tggaccccactggctgagaatctgg

SEQ ID NO: 1482 - DNA, 25 bp, Homo sapiens
tggaccccactggctgagaatctgg

SEQ ID NO: 1483 - DNA, 25 bp, Homo sapiens
tcctgtacttgtcctcagcttgggc

SEQ ID NO: 1484 - DNA, 25 bp, Homo sapiens
aaatgtttccttgtgcctgctcctg

SEQ ID NO: 1485 - DNA, 25 bp, Homo sapiens
tggaccccactggctgagaatctgg

SEQ ID NO: 1486 - DNA, 25 bp, Homo sapiens
cacccagctggtcctgtggatggga

SEQ ID NO: 1487 - DNA, 25 bp, Homo sapiens
aaatgtttccttgtgcctgctcctg

SEQ ID NO: 1488 - DNA, 25 bp, Homo sapiens
tcctgtacttgtcctcagcttgggc

SEQ ID NO: 1489 - DNA, 25 bp, Homo sapiens
tccttgtgcctgctcctgtacttgt

SEQ ID NO: 1490 - DNA, 25 bp, Homo sapiens
tcctgtacttgtcctcagcttgggc

SEQ ID NO: 1491 - DNA, 25 bp, Homo sapiens
cacccagctggtcctgtggatggga

SEQ ID NO: 1492 - DNA, 25 bp, Homo sapiens
tcctgtacttgtcctcagcttgggc

SEQ ID NO: 1493 - DNA, 25 bp, Homo sapiens
tggaccccactggctgagaatctgg

SEQ ID NO: 1494 - DNA, 25 bp, Homo sapiens
cacccagctggtcctgtggatggga

SEQ ID NO: 1495 - DNA, 25 bp, Homo sapiens
tgcctgctcctgtacttgtcctcag

SEQ ID NO: 1496 - DNA, 25 bp, Homo sapiens
aaatgtttccttgtgcctgctcctg

SEQ ID NO: 1497 - DNA, 25 bp, Homo sapiens
aagcctatacgtttctgtggagtaa

SEQ ID NO: 1498 - DNA, 25 bp, Homo sapiens
cacccagctggtcctgtggatggga

SEQ ID NO: 1499 - DNA, 25 bp, Homo sapiens
tgcctgctcctgtacttgtcctcag

SEQ ID NO: 1500 - DNA, 25 bp, Homo sapiens
cacccagctggtcctgtggatggga

SEQ ID NO: 1501 - DNA, 25 bp, Homo sapiens
acttgtcctcagcttgggcttcttc

SEQ ID NO: 1502 - DNA, 25 bp, Homo sapiens
tgcctgctcctgtacttgtcctcag

SEQ ID NO: 1503 - DNA, 25 bp, Homo sapiens
tcctgtacttgtcctcagcttgggc

SEQ ID NO: 1504 - DNA, 25 bp, Homo sapiens
gccccactggacaacactgattcct

SEQ ID NO: 1505 - DNA, 25 bp, Homo sapiens
tcctccatcacctgaaacactggac

SEQ ID NO: 1506 - DNA, 25 bp, Homo sapiens
tccttgtgcctgctcctgtacttgt

SEQ ID NO: 1507 - DNA, 25 bp, Homo sapiens
aagcctatacgtttctgtggagtaa

SEQ ID NO: 1508 - DNA, 25 bp, Homo sapiens
ttggacatctctagtgtagctgcca

SEQ ID NO: 1509 - DNA, 25 bp, Homo sapiens
tcctgtacttgtcctcagcttgggc

SEQ ID NO: 1510 - DNA, 25 bp, Homo sapiens
acttgtcctcagcttgggcttcttc

SEQ ID NO: 1511 - DNA, 25 bp, Homo sapiens
aagcctatacgtttctgtggagtaa

SEQ ID NO: 1512 - DNA, 25 bp, Homo sapiens
aagcctatacgtttctgtggagtaa

SEQ ID NO: 1513 - DNA, 25 bp, Homo sapiens
tgcctgctcctgtacttgtcctcag

SEQ ID NO: 1514 - DNA, 25 bp, Homo sapiens
tgcctgctcctgtacttgtcctcag

SEQ ID NO: 1515 - DNA, 25 bp, Homo sapiens
tccttgtgcctgctcctgtacttgt

SEQ ID NO: 1516 - DNA, 25 bp, Homo sapiens
cacccagctggtcctgtggatggga

SEQ ID NO: 1517 - DNA, 25 bp, Homo sapiens
acttgtcctcagcttgggcttcttc

SEQ ID NO: 1518 - DNA, 25 bp, Homo sapiens
cacccagctggtcctgtggatggga

SEQ ID NO: 1519 - DNA, 25 bp, Homo sapiens
gccccactggacaacactgattcct

SEQ ID NO: 1520 - DNA, 25 bp, Homo sapiens
tcctgtacttgtcctcagcttgggc

SEQ ID NO: 1521 - DNA, 25 bp, Homo sapiens
tcctgtacttgtcctcagcttgggc

SEQ ID NO: 1522 - DNA, 25 bp, Homo sapiens
gccccactggacaacactgattcct

SEQ ID NO: 1523 - DNA, 25 bp, Homo sapiens
tgcctgctcctgtacttgtcctcag

SEQ ID NO: 1524 - DNA, 25 bp, Homo sapiens
gccccactggacaacactgattcct

SEQ ID NO: 1525 - DNA, 25 bp, Homo sapiens
tcctgtacttgtcctcagcttgggc

SEQ ID NO: 1526 - DNA, 25 bp, Homo sapiens
tcctccatcacctgaaacactggac

SEQ ID NO: 1527 - DNA, 25 bp, Homo sapiens
tggaccccactggctgagaatctgg

SEQ ID NO: 1528 - DNA, 25 bp, Homo sapiens
aaatgtttccttgtgcctgctcctg

SEQ ID NO: 1529 - DNA, 25 bp, Homo sapiens
tgcctgctcctgtacttgtcctcag

SEQ ID NO: 1530 - DNA, 25 bp, Homo sapiens
gccccactggacaacactgattcct

SEQ ID NO: 1531 - DNA, 25 bp, Homo sapiens
ttggacatctctagtgtagctgcca

SEQ ID NO: 1532 - DNA, 25 bp, Homo sapiens
gccccactggacaacactgattcct

SEQ ID NO: 1533 - DNA, 25 bp, Homo sapiens
tcctccatcacctgaaacactggac

SEQ ID NO: 1534 - DNA, 25 bp, Homo sapiens
cacccagctggtcctgtggatggga

SEQ ID NO: 1535 - DNA, 25 bp, Homo sapiens
cacccagctggtcctgtggatggga

SEQ ID NO: 1536 - DNA, 25 bp, Homo sapiens
tcctgtacttgtcctcagcttgggc

SEQ ID NO: 1537 - DNA, 25 bp, Homo sapiens
tggaccccactggctgagaatctgg

SEQ ID NO: 1538 - DNA, 25 bp, Homo sapiens
tcctccatcacctgaaacactggac

SEQ ID NO: 1539 - DNA, 25 bp, Homo sapiens
tggaccccactggctgagaatctgg

SEQ ID NO: 1540 - DNA, 25 bp, Homo sapiens
gccccactggacaacactgattcct

SEQ ID NO: 1541 - DNA, 25 bp, Homo sapiens
tcctgtacttgtcctcagcttgggc

SEQ ID NO: 1542 - DNA, 25 bp, Homo sapiens
gccccactggacaacactgattcct

SEQ ID NO: 1543 - DNA, 25 bp, Homo sapiens
tcctccatcacctgaaacactggac

SEQ ID NO: 1544 - DNA, 25 bp, Homo sapiens
tcctgtacttgtcctcagcttgggc

SEQ ID NO: 1545 - DNA, 25 bp, Homo sapiens
tgcctgctcctgtacttgtcctcag

SEQ ID NO: 1546 - DNA, 25 bp, Homo sapiens
cacccagctggtcctgtggatggga

SEQ ID NO: 1547 - DNA, 25 bp, Homo sapiens
tccttgtgcctgctcctgtacttgt

SEQ ID NO: 1548 - DNA, 25 bp, Homo sapiens
acttgtcctcagcttgggcttcttc

SEQ ID NO: 1549 - DNA, 25 bp, Homo sapiens
cacccagctggtcctgtggatggga

SEQ ID NO: 1550 - DNA, 25 bp, Homo sapiens
tggaccccactggctgagaatctgg

SEQ ID NO: 1551 - DNA, 25 bp, Homo sapiens
tcctgtacttgtcctcagcttgggc

SEQ ID NO: 1552 - DNA, 25 bp, Homo sapiens
ttggacatctctagtgtagctgcca

SEQ ID NO: 1553 - DNA, 25 bp, Homo sapiens
tccttgtgcctgctcctgtacttgt

SEQ ID NO: 1554 - DNA, 25 bp, Homo sapiens
gccccactggacaacactgattcct

SEQ ID NO: 1555 - DNA, 25 bp, Homo sapiens
tgcctgctcctgtacttgtcctcag

SEQ ID NO: 1556 - DNA, 25 bp, Homo sapiens
aaatgtttccttgtgcctgctcctg

SEQ ID NO: 1557 - DNA, 25 bp, Homo sapiens
tccttgtgcctgctcctgtacttgt

SEQ ID NO: 1558 - DNA, 25 bp, Homo sapiens
tgcctgctcctgtacttgtcctcag

SEQ ID NO: 1559 - DNA, 25 bp, Homo sapiens
tcctgtacttgtcctcagcttgggc

SEQ ID NO: 1560 - DNA, 25 bp, Homo sapiens
cacccagctggtcctgtggatggga

SEQ ID NO: 1561 - DNA, 25 bp, Homo sapiens
ttggacatctctagtgtagctgcca

SEQ ID NO: 1562 - DNA, 25 bp, Homo sapiens
aaatgtttccttgtgcctgctcctg

SEQ ID NO: 1563 - DNA, 25 bp, Homo sapiens
aagcctatacgtttctgtggagtaa

SEQ ID NO: 1564 - DNA, 25 bp, Homo sapiens
aaatgtttccttgtgcctgctcctg

SEQ ID NO: 1565 - DNA, 25 bp, Homo sapiens
cacccagctggtcctgtggatggga

SEQ ID NO: 1566 - DNA, 25 bp, Homo sapiens
tccttgtgcctgctcctgtacttgt

SEQ ID NO: 1567 - DNA, 25 bp, Homo sapiens
tcctccatcacctgaaacactggac

SEQ ID NO: 1568 - DNA, 25 bp, Homo sapiens
acttgtcctcagcttgggcttcttc

SEQ ID NO: 1569 - DNA, 25 bp, Homo sapiens
tcctgtacttgtcctcagcttgggc

SEQ ID NO: 1570 - DNA, 25 bp, Homo sapiens
tccttgtgcctgctcctgtacttgt

SEQ ID NO: 1571 - DNA, 25 bp, Homo sapiens
tgcctgctcctgtacttgtcctcag

SEQ ID NO: 1572 - DNA, 25 bp, Homo sapiens
gccccactggacaacactgattcct

SEQ ID NO: 1573 - DNA, 25 bp, Homo sapiens
acttgtcctcagcttgggcttcttc

SEQ ID NO: 1574 - DNA, 25 bp, Homo sapiens
tccttgtgcctgctcctgtacttgt

SEQ ID NO: 1575 - DNA, 25 bp, Homo sapiens
tgcctgctcctgtacttgtcctcag

SEQ ID NO: 1576 - DNA, 25 bp, Homo sapiens
tcctccatcacctgaaacactggac

SEQ ID NO: 1577 - DNA, 25 bp, Homo sapiens
tggaccccactggctgagaatctgg

SEQ ID NO: 1578 - DNA, 25 bp, Homo sapiens
tcctccatcacctgaaacactggac

SEQ ID NO: 1579 - DNA, 25 bp, Homo sapiens
aaatgtttccttgtgcctgctcctg

SEQ ID NO: 1580 - DNA, 25 bp, Homo sapiens
gccccactggacaacactgattcct

SEQ ID NO: 1581 - DNA, 25 bp, Homo sapiens
tcctccatcacctgaaacactggac

SEQ ID NO: 1582 - DNA, 25 bp, Homo sapiens
acttgtcctcagcttgggcttcttc

SEQ ID NO: 1583 - DNA, 25 bp, Homo sapiens
gccccactggacaacactgattcct

SEQ ID NO: 1584 - DNA, 25 bp, Homo sapiens
cacccagctggtcctgtggatggga

SEQ ID NO: 1585 - DNA, 25 bp, Homo sapiens
tcctccatcacctgaaacactggac

SEQ ID NO: 1586 - DNA, 25 bp, Homo sapiens
tggaccccactggctgagaatctgg

SEQ ID NO: 1587 - DNA, 25 bp, Homo sapiens
tgcctgctcctgtacttgtcctcag

SEQ ID NO: 1588 - DNA, 25 bp, Homo sapiens
aaatgtttccttgtgcctgctcctg

SEQ ID NO: 1589 - DNA, 25 bp, Homo sapiens
ttggacatctctagtgtagctgcca

SEQ ID NO: 1590 - DNA, 25 bp, Homo sapiens
aaatgtttccttgtgcctgctcctg

SEQ ID NO: 1591 - DNA, 25 bp, Homo sapiens
gccccactggacaacactgattcct

SEQ ID NO: 1592 - DNA, 25 bp, Homo sapiens
tcctccatcacctgaaacactggac

SEQ ID NO: 1593 - DNA, 25 bp, Homo sapiens
ttggacatctctagtgtagctgcca

SEQ ID NO: 1594 - DNA, 25 bp, Homo sapiens
cacccagctggtcctgtggatggga

SEQ ID NO: 1595 - DNA, 25 bp, Homo sapiens
aaatgtttccttgtgcctgctcctg

SEQ ID NO: 1596 - DNA, 25 bp, Homo sapiens
aagcctatacgtttctgtggagtaa

SEQ ID NO: 1597 - DNA, 25 bp, Homo sapiens
cacccagctggtcctgtggatggga

SEQ ID NO: 1598 - DNA, 25 bp, Homo sapiens
ttggacatctctagtgtagctgcca

SEQ ID NO: 1599 - DNA, 25 bp, Homo sapiens
acttgtcctcagcttgggcttcttc

SEQ ID NO: 1600 - DNA, 25 bp, Homo sapiens
ttggacatctctagtgtagctgcca

SEQ ID NO: 1601 - DNA, 25 bp, Homo sapiens
ttggacatctctagtgtagctgcca

SEQ ID NO: 1602 - DNA, 25 bp, Homo sapiens
gccccactggacaacactgattcct

SEQ ID NO: 1603 - DNA, 25 bp, Homo sapiens
tggaccccactggctgagaatctgg

SEQ ID NO: 1604 - DNA, 25 bp, Homo sapiens
aagcctatacgtttctgtggagtaa

SEQ ID NO: 1605 - DNA, 25 bp, Homo sapiens
acttgtcctcagcttgggcttcttc

SEQ ID NO: 1606 - DNA, 25 bp, Homo sapiens
acttgtcctcagcttgggcttcttc

SEQ ID NO: 1607 - DNA, 25 bp, Homo sapiens
acttgtcctcagcttgggcttcttc

SEQ ID NO: 1608 - DNA, 25 bp, Homo sapiens
acttgtcctcagcttgggcttcttc

SEQ ID NO: 1609 - DNA, 25 bp, Homo sapiens
tgcctgctcctgtacttgtcctcag

SEQ ID NO: 1610 - DNA, 25 bp, Homo sapiens
tcctgtacttgtcctcagcttgggc

SEQ ID NO: 1611 - DNA, 25 bp, Homo sapiens
tggaccccactggctgagaatctgg

SEQ ID NO: 1612 - DNA, 25 bp, Homo sapiens
tccttgtgcctgctcctgtacttgt

SEQ ID NO: 1613 - DNA, 25 bp, Homo sapiens
tggaccccactggctgagaatctgg

SEQ ID NO: 1614 - DNA, 25 bp, Homo sapiens
tccttgtgcctgctcctgtacttgt

SEQ ID NO: 1615 - DNA, 25 bp, Homo sapiens
gccccactggacaacactgattcct

SEQ ID NO: 1616 - DNA, 25 bp, Homo sapiens
tccttgtgcctgctcctgtacttgt

SEQ ID NO: 1617 - DNA, 25 bp, Homo sapiens
aaatgtttccttgtgcctgctcctg

SEQ ID NO: 1618 - DNA, 25 bp, Homo sapiens
tcctccatcacctgaaacactggac

SEQ ID NO: 1619 - DNA, 25 bp, Homo sapiens
aagcctatacgtttctgtggagtaa

SEQ ID NO: 1620 - DNA, 25 bp, Homo sapiens
gccccactggacaacactgattcct

SEQ ID NO: 1621 - DNA, 25 bp, Homo sapiens
ttggacatctctagtgtagctgcca

SEQ ID NO: 1622 - DNA, 25 bp, Homo sapiens
acttgtcctcagcttgggcttcttc

SEQ ID NO: 1623 - DNA, 25 bp, Homo sapiens
tgcctgctcctgtacttgtcctcag

SEQ ID NO: 1624 - DNA, 25 bp, Homo sapiens
acttgtcctcagcttgggcttcttc

SEQ ID NO: 1625 - DNA, 25 bp, Homo sapiens
aaatgtttccttgtgcctgctcctg

SEQ ID NO: 1626 - DNA, 25 bp, Homo sapiens
tcctccatcacctgaaacactggac

SEQ ID NO: 1627 - DNA, 25 bp, Homo sapiens
tccttgtgcctgctcctgtacttgt

SEQ ID NO: 1628 - DNA, 25 bp, Homo sapiens
tggaccccactggctgagaatctgg

SEQ ID NO: 1629 - DNA, 25 bp, Homo sapiens
ttggacatctctagtgtagctgcca

SEQ ID NO: 1630 - DNA, 25 bp, Homo sapiens
tccttgtgcctgctcctgtacttgt

SEQ ID NO: 1631 - DNA, 25 bp, Homo sapiens
tcctgtacttgtcctcagcttgggc

SEQ ID NO: 1632 - DNA, 25 bp, Homo sapiens
tcctccatcacctgaaacactggac

SEQ ID NO: 1633 - DNA, 25 bp, Homo sapiens
aagcctatacgtttctgtggagtaa

SEQ ID NO: 1634 - DNA, 25 bp, Homo sapiens
aaatgtttccttgtgcctgctcctg

SEQ ID NO: 1635 - DNA, 25 bp, Homo sapiens
aaatgtttccttgtgcctgctcctg

SEQ ID NO: 1636 - DNA, 25 bp, Homo sapiens
ttggacatctctagtgtagctgcca

SEQ ID NO: 1637 - DNA, 25 bp, Homo sapiens
tcctgtacttgtcctcagcttgggc

SEQ ID NO: 1638 - DNA, 25 bp, Homo sapiens
gccccactggacaacactgattcct

SEQ ID NO: 1639 - DNA, 25 bp, Homo sapiens
aagcctatacgtttctgtggagtaa

SEQ ID NO: 1640 - DNA, 25 bp, Homo sapiens
aagcctatacgtttctgtggagtaa

SEQ ID NO: 1641 - DNA, 25 bp, Homo sapiens
ttggacatctctagtgtagctgcca

SEQ ID NO: 1642 - DNA, 25 bp, Homo sapiens
ttggacatctctagtgtagctgcca

SEQ ID NO: 1643 - DNA, 25 bp, Homo sapiens
aaatgtttccttgtgcctgctcctg

SEQ ID NO: 1644 - DNA, 25 bp, Homo sapiens
tcctccatcacctgaaacactggac

SEQ ID NO: 1645 - DNA, 25 bp, Homo sapiens
acttgtcctcagcttgggcttcttc

SEQ ID NO: 1646 - DNA, 25 bp, Homo sapiens
acttgtcctcagcttgggcttcttc

SEQ ID NO: 1647 - DNA, 25 bp, Homo sapiens
ttggacatctctagtgtagctgcca

SEQ ID NO: 1648 - DNA, 25 bp, Homo sapiens
tggaccccactggctgagaatctgg

SEQ ID NO: 1649 - DNA, 25 bp, Homo sapiens
aagcctatacgtttctgtggagtaa

SEQ ID NO: 1650 - DNA, 25 bp, Homo sapiens
gccccactggacaacactgattcct

SEQ ID NO: 1651 - DNA, 25 bp, Homo sapiens
acttgtcctcagcttgggcttcttc

SEQ ID NO: 1652 - DNA, 25 bp, Homo sapiens
tggaccccactggctgagaatctgg

SEQ ID NO: 1653 - DNA, 25 bp, Homo sapiens
aagcctatacgtttctgtggagtaa

SEQ ID NO: 1654 - DNA, 25 bp, Homo sapiens
ttggacatctctagtgtagctgcca

SEQ ID NO: 1655 - DNA, 25 bp, Homo sapiens
ttggacatctctagtgtagctgcca

SEQ ID NO: 1656 - DNA, 25 bp, Homo sapiens
tcctccatcacctgaaacactggac

SEQ ID NO: 1657 - DNA, 25 bp, Homo sapiens
tggaccccactggctgagaatctgg

SEQ ID NO: 1658 - DNA, 25 bp, Homo sapiens
aagcctatacgtttctgtggagtaa

SEQ ID NO: 1659 - DNA, 25 bp, Homo sapiens
ttggacatctctagtgtagctgcca

SEQ ID NO: 1660 - DNA, 25 bp, Homo sapiens
ttggacatctctagtgtagctgcca

SEQ ID NO: 1661 - DNA, 25 bp, Homo sapiens
tggaccccactggctgagaatctgg

SEQ ID NO: 1662 - DNA, 25 bp, Homo sapiens
gccccactggacaacactgattcct

SEQ ID NO: 1663 - DNA, 25 bp, Homo sapiens
tggaccccactggctgagaatctgg

SEQ ID NO: 1664 - DNA, 25 bp, Homo sapiens
cacccagctggtcctgtggatggga

SEQ ID NO: 1665 - DNA, 25 bp, Homo sapiens
aaatgtttccttgtgcctgctcctg

SEQ ID NO: 1666 - DNA, 25 bp, Homo sapiens
aagcctatacgtttctgtggagtaa

SEQ ID NO: 1667 - DNA, 25 bp, Homo sapiens
aagcctatacgtttctgtggagtaa

SEQ ID NO: 1668 - DNA, 25 bp, Homo sapiens
ttggacatctctagtgtagctgcca

SEQ ID NO: 1669 - DNA, 25 bp, Homo sapiens
tggaccccactggctgagaatctgg

SEQ ID NO: 1670 - DNA, 25 bp, Homo sapiens
acttgtcctcagcttgggcttcttc

SEQ ID NO: 1671 - DNA, 25 bp, Homo sapiens
ttggacatctctagtgtagctgcca

SEQ ID NO: 1672 - DNA, 25 bp, Homo sapiens
tggaccccactggctgagaatctgg

SEQ ID NO: 1673 - DNA, 25 bp, Homo sapiens
cacccagctggtcctgtggatggga

SEQ ID NO: 1674 - DNA, 25 bp, Homo sapiens
tcctccatcacctgaaacactggac

SEQ ID NO: 1675 - DNA, 25 bp, Homo sapiens
acttgtcctcagcttgggcttcttc

SEQ ID NO: 1676 - DNA, 25 bp, Homo sapiens
aagcctatacgtttctgtggagtaa

SEQ ID NO: 1677 - DNA, 25 bp, Homo sapiens
cacccagctggtcctgtggatggga

SEQ ID NO: 1678 - DNA, 25 bp, Homo sapiens
tccttgtgcctgctcctgtacttgt

SEQ ID NO: 1679 - DNA, 25 bp, Homo sapiens
ttggacatctctagtgtagctgcca

SEQ ID NO: 1680 - DNA, 25 bp, Homo sapiens
tcctgtacttgtcctcagcttgggc

SEQ ID NO: 1681 - DNA, 25 bp, Homo sapiens
ttggacatctctagtgtagctgcca

SEQ ID NO: 1682 - DNA, 25 bp, Homo sapiens
tcctgtacttgtcctcagcttgggc

SEQ ID NO: 1683 - DNA, 25 bp, Homo sapiens
cacccagctggtcctgtggatggga

SEQ ID NO: 1684 - DNA, 25 bp, Homo sapiens
tcctccatcacctgaaacactggac

SEQ ID NO: 1685 - DNA, 25 bp, Homo sapiens
aaatgtttccttgtgcctgctcctg

SEQ ID NO: 1686 - DNA, 25 bp, Homo sapiens
gccccactggacaacactgattcct

SEQ ID NO: 1687 - DNA, 25 bp, Homo sapiens
acttgtcctcagcttgggcttcttc

SEQ ID NO: 1688 - DNA, 25 bp, Homo sapiens
acttgtcctcagcttgggcttcttc

SEQ ID NO: 1689 - DNA, 25 bp, Homo sapiens
tgcctgctcctgtacttgtcctcag

SEQ ID NO: 1690 - DNA, 25 bp, Homo sapiens
tgcctgctcctgtacttgtcctcag

SEQ ID NO: 1691 - DNA, 25 bp, Homo sapiens
tgcctgctcctgtacttgtcctcag

SEQ ID NO: 1692 - DNA, 25 bp, Homo sapiens
tcctccatcacctgaaacactggac

SEQ ID NO: 1693 - DNA, 25 bp, Homo sapiens
tgcctgctcctgtacttgtcctcag

SEQ ID NO: 1694 - DNA, 25 bp, Homo sapiens
tggaccccactggctgagaatctgg

SEQ ID NO: 1695 - DNA, 25 bp, Homo sapiens
aagcctatacgtttctgtggagtaa

SEQ ID NO: 1696 - DNA, 25 bp, Homo sapiens
aagcctatacgtttctgtggagtaa

SEQ ID NO: 1697 - DNA, 25 bp, Homo sapiens
aagcctatacgtttctgtggagtaa

SEQ ID NO: 1698 - DNA, 25 bp, Homo sapiens
acttgtcctcagcttgggcttcttc

SEQ ID NO: 1699 - DNA, 25 bp, Homo sapiens
cacccagctggtcctgtggatggga

SEQ ID NO: 1700 - DNA, 25 bp, Homo sapiens
aaatgtttccttgtgcctgctcctg

SEQ ID NO: 1701 - DNA, 25 bp, Homo sapiens
cacccagctggtcctgtggatggga

SEQ ID NO: 1702 - DNA, 25 bp, Homo sapiens
tggaccccactggctgagaatctgg

SEQ ID NO: 1703 - DNA, 25 bp, Homo sapiens
aagcctatacgtttctgtggagtaa

SEQ ID NO: 1704 - DNA, 25 bp, Homo sapiens
tgcctgctcctgtacttgtcctcag

SEQ ID NO: 1705 - DNA, 25 bp, Homo sapiens
ttggacatctctagtgtagctgcca

SEQ ID NO: 1706 - DNA, 25 bp, Homo sapiens
tcctccatcacctgaaacactggac

SEQ ID NO: 1707 - DNA, 25 bp, Homo sapiens
tcctccatcacctgaaacactggac

SEQ ID NO: 1708 - DNA, 25 bp, Homo sapiens
ttggacatctctagtgtagctgcca

SEQ ID NO: 1709 - DNA, 25 bp, Homo sapiens
ttggacatctctagtgtagctgcca

SEQ ID NO: 1710 - DNA, 25 bp, Homo sapiens
ttggacatctctagtgtagctgcca

SEQ ID NO: 1711 - DNA, 25 bp, Homo sapiens
gccccactggacaacactgattcct

SEQ ID NO: 1712 - DNA, 25 bp, Homo sapiens
tggaccccactggctgagaatctgg

SEQ ID NO: 1713 - DNA, 25 bp, Homo sapiens
tccttgtgcctgctcctgtacttgt

SEQ ID NO: 1714 - DNA, 25 bp, Homo sapiens
gccccactggacaacactgattcct

SEQ ID NO: 1715 - DNA, 25 bp, Homo sapiens
tggaccccactggctgagaatctgg

SEQ ID NO: 1716 - DNA, 25 bp, Homo sapiens
aaatgtttccttgtgcctgctcctg

SEQ ID NO: 1717 - DNA, 25 bp, Homo sapiens
tcctgtacttgtcctcagcttgggc

SEQ ID NO: 1718 - DNA, 25 bp, Homo sapiens
gccccactggacaacactgattcct

SEQ ID NO: 1719 - DNA, 25 bp, Homo sapiens
tcctgtacttgtcctcagcttgggc

SEQ ID NO: 1720 - DNA, 25 bp, Homo sapiens
tcctgtacttgtcctcagcttgggc

SEQ ID NO: 1721 - DNA, 25 bp, Homo sapiens
tgcctgctcctgtacttgtcctcag

SEQ ID NO: 1722 - DNA, 25 bp, Homo sapiens
ttggacatctctagtgtagctgcca

SEQ ID NO: 1723 - DNA, 25 bp, Homo sapiens
tcctgtacttgtcctcagcttgggc

SEQ ID NO: 1724 - DNA, 25 bp, Homo sapiens
gccccactggacaacactgattcct

SEQ ID NO: 1725 - DNA, 25 bp, Homo sapiens
tggaccccactggctgagaatctgg

SEQ ID NO: 1726 - DNA, 25 bp, Homo sapiens
tggaccccactggctgagaatctgg

SEQ ID NO: 1727 - DNA, 25 bp, Homo sapiens
tggaccccactggctgagaatctgg

SEQ ID NO: 1728 - DNA, 25 bp, Homo sapiens
ttggacatctctagtgtagctgcca

SEQ ID NO: 1729 - DNA, 25 bp, Homo sapiens
cacccagctggtcctgtggatggga

SEQ ID NO: 1730 - DNA, 25 bp, Homo sapiens
tggaccccactggctgagaatctgg

SEQ ID NO: 1731 - DNA, 25 bp, Homo sapiens
tggaccccactggctgagaatctgg

SEQ ID NO: 1732 - DNA, 25 bp, Homo sapiens
tcctgtacttgtcctcagcttgggc

SEQ ID NO: 1733 - DNA, 25 bp, Homo sapiens
acttgtcctcagcttgggcttcttc

SEQ ID NO: 1734 - DNA, 25 bp, Homo sapiens
aagcctatacgtttctgtggagtaa

SEQ ID NO: 1735 - DNA, 25 bp, Homo sapiens
ttggacatctctagtgtagctgcca

SEQ ID NO: 1736 - DNA, 25 bp, Homo sapiens
aagcctatacgtttctgtggagtaa

SEQ ID NO: 1737 - DNA, 25 bp, Homo sapiens
cacccagctggtcctgtggatggga

SEQ ID NO: 1738 - DNA, 25 bp, Homo sapiens
tcctgtacttgtcctcagcttgggc

SEQ ID NO: 1739 - DNA, 25 bp, Homo sapiens
gccccactggacaacactgattcct

SEQ ID NO: 1740 - DNA, 25 bp, Homo sapiens
cacccagctggtcctgtggatggga

SEQ ID NO: 1741 - DNA, 25 bp, Homo sapiens
gccccactggacaacactgattcct

SEQ ID NO: 1742 - DNA, 25 bp, Homo sapiens
aaatgtttccttgtgcctgctcctg

SEQ ID NO: 1743 - DNA, 25 bp, Homo sapiens
aagcctatacgtttctgtggagtaa

SEQ ID NO: 1744 - DNA, 25 bp, Homo sapiens
tggaccccactggctgagaatctgg

SEQ ID NO: 1745 - DNA, 25 bp, Homo sapiens
gccccactggacaacactgattcct

SEQ ID NO: 1746 - DNA, 25 bp, Homo sapiens
gccccactggacaacactgattcct

SEQ ID NO: 1747 - DNA, 25 bp, Homo sapiens
tccttgtgcctgctcctgtacttgt

SEQ ID NO: 1748 - DNA, 25 bp, Homo sapiens
tcctgtacttgtcctcagcttgggc

SEQ ID NO: 1749 - DNA, 25 bp, Homo sapiens
cacccagctggtcctgtggatggga

SEQ ID NO: 1750 - DNA, 25 bp, Homo sapiens
cacccagctggtcctgtggatggga

SEQ ID NO: 1751 - DNA, 25 bp, Homo sapiens
ttggacatctctagtgtagctgcca

SEQ ID NO: 1752 - DNA, 25 bp, Homo sapiens
tcctgtacttgtcctcagcttgggc

SEQ ID NO: 1753 - DNA, 25 bp, Homo sapiens
aaatgtttccttgtgcctgctcctg

SEQ ID NO: 1754 - DNA, 25 bp, Homo sapiens
cacccagctggtcctgtggatggga

SEQ ID NO: 1755 - DNA, 25 bp, Homo sapiens
cacccagctggtcctgtggatggga

SEQ ID NO: 1756 - DNA, 25 bp, Homo sapiens
ttggacatctctagtgtagctgcca

SEQ ID NO: 1757 - DNA, 25 bp, Homo sapiens
tgcctgctcctgtacttgtcctcag

SEQ ID NO: 1758 - DNA, 25 bp, Homo sapiens
tggaccccactggctgagaatctgg

SEQ ID NO: 1759 - DNA, 25 bp, Homo sapiens
tgcctgctcctgtacttgtcctcag

SEQ ID NO: 1760 - DNA, 25 bp, Homo sapiens
tcctccatcacctgaaacactggac

SEQ ID NO: 1761 - DNA, 25 bp, Homo sapiens
tcctccatcacctgaaacactggac

SEQ ID NO: 1762 - DNA, 25 bp, Homo sapiens
cacccagctggtcctgtggatggga

SEQ ID NO: 1763 - DNA, 25 bp, Homo sapiens
tgcctgctcctgtacttgtcctcag

SEQ ID NO: 1764 - DNA, 25 bp, Homo sapiens
tggaccccactggctgagaatctgg

SEQ ID NO: 1765 - DNA, 25 bp, Homo sapiens
cacccagctggtcctgtggatggga

SEQ ID NO: 1766 - DNA, 25 bp, Homo sapiens
tgcctgctcctgtacttgtcctcag

SEQ ID NO: 1767 - DNA, 25 bp, Homo sapiens
acttgtcctcagcttgggcttcttc

SEQ ID NO: 1768 - DNA, 25 bp, Homo sapiens
tcctccatcacctgaaacactggac

SEQ ID NO: 1769 - DNA, 25 bp, Homo sapiens
cacccagctggtcctgtggatggga

SEQ ID NO: 1770 - DNA, 25 bp, Homo sapiens
tggaccccactggctgagaatctgg

SEQ ID NO: 1771 - DNA, 25 bp, Homo sapiens
tccttgtgcctgctcctgtacttgt

SEQ ID NO: 1772 - DNA, 25 bp, Homo sapiens
aagcctatacgtttctgtggagtaa

SEQ ID NO: 1773 - DNA, 25 bp, Homo sapiens
ttggacatctctagtgtagctgcca

SEQ ID NO: 1774 - DNA, 25 bp, Homo sapiens
cacccagctggtcctgtggatggga

SEQ ID NO: 1775 - DNA, 25 bp, Homo sapiens
acttgtcctcagcttgggcttcttc

SEQ ID NO: 1776 - DNA, 25 bp, Homo sapiens
tgcctgctcctgtacttgtcctcag

SEQ ID NO: 1777 - DNA, 25 bp, Homo sapiens
acttgtcctcagcttgggcttcttc

SEQ ID NO: 1778 - DNA, 25 bp, Homo sapiens
tcctccatcacctgaaacactggac

SEQ ID NO: 1779 - DNA, 25 bp, Homo sapiens
tcctccatcacctgaaacactggac

SEQ ID NO: 1780 - DNA, 25 bp, Homo sapiens
tgcctgctcctgtacttgtcctcag

SEQ ID NO: 1781 - DNA, 25 bp, Homo sapiens
tccttgtgcctgctcctgtacttgt

SEQ ID NO: 1782 - DNA, 25 bp, Homo sapiens
ttggacatctctagtgtagctgcca

SEQ ID NO: 1783 - DNA, 25 bp, Homo sapiens
aagcctatacgtttctgtggagtaa

SEQ ID NO: 1784 - DNA, 25 bp, Homo sapiens
ttggacatctctagtgtagctgcca

SEQ ID NO: 1785 - DNA, 25 bp, Homo sapiens
tccttgtgcctgctcctgtacttgt

SEQ ID NO: 1786 - DNA, 25 bp, Homo sapiens
aaatgtttccttgtgcctgctcctg

SEQ ID NO: 1787 - DNA, 25 bp, Homo sapiens
aaatgtttccttgtgcctgctcctg

SEQ ID NO: 1788 - DNA, 25 bp, Homo sapiens
tcctgtacttgtcctcagcttgggc

SEQ ID NO: 1789 - DNA, 25 bp, Homo sapiens
tcctccatcacctgaaacactggac

SEQ ID NO: 1790 - DNA, 25 bp, Homo sapiens
tcctccatcacctgaaacactggac

SEQ ID NO: 1791 - DNA, 25 bp, Homo sapiens
aagcctatacgtttctgtggagtaa

SEQ ID NO: 1792 - DNA, 25 bp, Homo sapiens
gccccactggacaacactgattcct

SEQ ID NO: 1793 - DNA, 25 bp, Homo sapiens
tcctccatcacctgaaacactggac

SEQ ID NO: 1794 - DNA, 25 bp, Homo sapiens
acttgtcctcagcttgggcttcttc

SEQ ID NO: 1795 - DNA, 25 bp, Homo sapiens
tgcctgctcctgtacttgtcctcag

SEQ ID NO: 1796 - DNA, 25 bp, Homo sapiens
ttggacatctctagtgtagctgcca

SEQ ID NO: 1797 - DNA, 25 bp, Homo sapiens
tggaccccactggctgagaatctgg

SEQ ID NO: 1798 - DNA, 25 bp, Homo sapiens
tggaccccactggctgagaatctgg

SEQ ID NO: 1799 - DNA, 25 bp, Homo sapiens
aaatgtttccttgtgcctgctcctg

SEQ ID NO: 1800 - DNA, 25 bp, Homo sapiens
tgcctgctcctgtacttgtcctcag

SEQ ID NO: 1801 - DNA, 25 bp, Homo sapiens
acttgtcctcagcttgggcttcttc

SEQ ID NO: 1802 - DNA, 25 bp, Homo sapiens
tccttgtgcctgctcctgtacttgt

SEQ ID NO: 1803 - DNA, 25 bp, Homo sapiens
ttggacatctctagtgtagctgcca

SEQ ID NO: 1804 - DNA, 25 bp, Homo sapiens
tgcctgctcctgtacttgtcctcag

SEQ ID NO: 1805 - DNA, 25 bp, Homo sapiens
acttgtcctcagcttgggcttcttc

SEQ ID NO: 1806 - DNA, 25 bp, Homo sapiens
cacccagctggtcctgtggatggga

SEQ ID NO: 1807 - DNA, 25 bp, Homo sapiens
tggaccccactggctgagaatctgg

SEQ ID NO: 1808 - DNA, 25 bp, Homo sapiens
acttgtcctcagcttgggcttcttc

SEQ ID NO: 1809 - DNA, 25 bp, Homo sapiens
tcctgtacttgtcctcagcttgggc

SEQ ID NO: 1810 - DNA, 25 bp, Homo sapiens
tcctccatcacctgaaacactggac

SEQ ID NO: 1811 - DNA, 25 bp, Homo sapiens
tggaccccactggctgagaatctgg

SEQ ID NO: 1812 - DNA, 25 bp, Homo sapiens
tccttgtgcctgctcctgtacttgt

SEQ ID NO: 1813 - DNA, 25 bp, Homo sapiens
tccttgtgcctgctcctgtacttgt

SEQ ID NO: 1814 - DNA, 25 bp, Homo sapiens
tcctccatcacctgaaacactggac

SEQ ID NO: 1815 - DNA, 25 bp, Homo sapiens
aagcctatacgtttctgtggagtaa

SEQ ID NO: 1816 - DNA, 25 bp, Homo sapiens
aaatgtttccttgtgcctgctcctg

SEQ ID NO: 1817 - DNA, 25 bp, Homo sapiens
tcctgtacttgtcctcagcttgggc

SEQ ID NO: 1818 - DNA, 25 bp, Homo sapiens
tggaccccactggctgagaatctgg

SEQ ID NO: 1819 - DNA, 25 bp, Homo sapiens
tcctccatcacctgaaacactggac

SEQ ID NO: 1820 - DNA, 25 bp, Homo sapiens
gccccactggacaacactgattcct

SEQ ID NO: 1821 - DNA, 25 bp, Homo sapiens
gccccactggacaacactgattcct

SEQ ID NO: 1822 - DNA, 25 bp, Homo sapiens
aaatgtttccttgtgcctgctcctg

SEQ ID NO: 1823 - DNA, 25 bp, Homo sapiens
tcctgtacttgtcctcagcttgggc

SEQ ID NO: 1824 - DNA, 25 bp, Homo sapiens
tggaccccactggctgagaatctgg

SEQ ID NO: 1825 - DNA, 25 bp, Homo sapiens
tcctgtacttgtcctcagcttgggc

SEQ ID NO: 1826 - DNA, 25 bp, Homo sapiens
tcctccatcacctgaaacactggac

SEQ ID NO: 1827 - DNA, 25 bp, Homo sapiens
tccttgtgcctgctcctgtacttgt

SEQ ID NO: 1828 - DNA, 25 bp, Homo sapiens
tgcctgctcctgtacttgtcctcag

SEQ ID NO: 1829 - DNA, 25 bp, Homo sapiens
ttggacatctctagtgtagctgcca

SEQ ID NO: 1830 - DNA, 25 bp, Homo sapiens
tccttgtgcctgctcctgtacttgt

SEQ ID NO: 1831 - DNA, 25 bp, Homo sapiens
ttggacatctctagtgtagctgcca

SEQ ID NO: 1832 - DNA, 25 bp, Homo sapiens
tcctccatcacctgaaacactggac

SEQ ID NO: 1833 - DNA, 25 bp, Homo sapiens
ttggacatctctagtgtagctgcca

SEQ ID NO: 1834 - DNA, 25 bp, Homo sapiens
tcctccatcacctgaaacactggac

SEQ ID NO: 1835 - DNA, 25 bp, Homo sapiens
acttgtcctcagcttgggcttcttc

SEQ ID NO: 1836 - DNA, 25 bp, Homo sapiens
tcctccatcacctgaaacactggac

SEQ ID NO: 1837 - DNA, 25 bp, Homo sapiens
tcctgtacttgtcctcagcttgggc

SEQ ID NO: 1838 - DNA, 25 bp, Homo sapiens
tcctccatcacctgaaacactggac

SEQ ID NO: 1839 - DNA, 25 bp, Homo sapiens
acttgtcctcagcttgggcttcttc

SEQ ID NO: 1840 - DNA, 25 bp, Homo sapiens
tgcctgctcctgtacttgtcctcag

SEQ ID NO: 1841 - DNA, 25 bp, Homo sapiens
tcctgtacttgtcctcagcttgggc

SEQ ID NO: 1842 - DNA, 25 bp, Homo sapiens
cacccagctggtcctgtggatggga

SEQ ID NO: 1843 - DNA, 25 bp, Homo sapiens
tcctgtacttgtcctcagcttgggc

SEQ ID NO: 1844 - DNA, 25 bp, Homo sapiens
gccccactggacaacactgattcct

SEQ ID NO: 1845 - DNA, 25 bp, Homo sapiens
tcctgtacttgtcctcagcttgggc

SEQ ID NO: 1846 - DNA, 25 bp, Homo sapiens
tcctgtacttgtcctcagcttgggc

SEQ ID NO: 1847 - DNA, 25 bp, Homo sapiens
tcctgtacttgtcctcagcttgggc

SEQ ID NO: 1848 - DNA, 25 bp, Homo sapiens
tccttgtgcctgctcctgtacttgt

SEQ ID NO: 1849 - DNA, 25 bp, Homo sapiens
ttggacatctctagtgtagctgcca

SEQ ID NO: 1850 - DNA, 25 bp, Homo sapiens
tccttgtgcctgctcctgtacttgt

SEQ ID NO: 1851 - DNA, 25 bp, Homo sapiens
gccccactggacaacactgattcct

SEQ ID NO: 1852 - DNA, 25 bp, Homo sapiens
aaatgtttccttgtgcctgctcctg

SEQ ID NO: 1853 - DNA, 25 bp, Homo sapiens
tgcctgctcctgtacttgtcctcag

SEQ ID NO: 1854 - DNA, 25 bp, Homo sapiens
aagcctatacgtttctgtggagtaa

SEQ ID NO: 1855 - DNA, 25 bp, Homo sapiens
tccttgtgcctgctcctgtacttgt

SEQ ID NO: 1856 - DNA, 25 bp, Homo sapiens
tcctgtacttgtcctcagcttgggc

SEQ ID NO: 1857 - DNA, 25 bp, Homo sapiens
cacccagctggtcctgtggatggga

SEQ ID NO: 1858 - DNA, 25 bp, Homo sapiens
aaatgtttccttgtgcctgctcctg

SEQ ID NO: 1859 - DNA, 25 bp, Homo sapiens
cacccagctggtcctgtggatggga

SEQ ID NO: 1860 - DNA, 25 bp, Homo sapiens
tccttgtgcctgctcctgtacttgt

SEQ ID NO: 1861 - DNA, 25 bp, Homo sapiens
tccttgtgcctgctcctgtacttgt

SEQ ID NO: 1862 - DNA, 25 bp, Homo sapiens
tcctccatcacctgaaacactggac

SEQ ID NO: 1863 - DNA, 25 bp, Homo sapiens
tgcctgctcctgtacttgtcctcag

SEQ ID NO: 1864 - DNA, 25 bp, Homo sapiens
cacccagctggtcctgtggatggga

SEQ ID NO: 1865 - DNA, 25 bp, Homo sapiens
aagcctatacgtttctgtggagtaa

SEQ ID NO: 1866 - DNA, 25 bp, Homo sapiens
acttgtcctcagcttgggcttcttc

SEQ ID NO: 1867 - DNA, 25 bp, Homo sapiens
acttgtcctcagcttgggcttcttc

SEQ ID NO: 1868 - DNA, 25 bp, Homo sapiens
tcctgtacttgtcctcagcttgggc

SEQ ID NO: 1869 - DNA, 25 bp, Homo sapiens
tcctgtacttgtcctcagcttgggc

SEQ ID NO: 1870 - DNA, 25 bp, Homo sapiens
tcctccatcacctgaaacactggac

SEQ ID NO: 1871 - DNA, 25 bp, Homo sapiens
tcctgtacttgtcctcagcttgggc

SEQ ID NO: 1872 - DNA, 25 bp, Homo sapiens
gccccactggacaacactgattcct

SEQ ID NO: 1873 - DNA, 25 bp, Homo sapiens
gccccactggacaacactgattcct

SEQ ID NO: 1874 - DNA, 25 bp, Homo sapiens
tcctgtacttgtcctcagcttgggc

SEQ ID NO: 1875 - DNA, 25 bp, Homo sapiens
tgcctgctcctgtacttgtcctcag

SEQ ID NO: 1876 - DNA, 25 bp, Homo sapiens
cacccagctggtcctgtggatggga

SEQ ID NO: 1877 - DNA, 25 bp, Homo sapiens
aagcctatacgtttctgtggagtaa

SEQ ID NO: 1878 - DNA, 25 bp, Homo sapiens
gccccactggacaacactgattcct

SEQ ID NO: 1879 - DNA, 25 bp, Homo sapiens
tcctgtacttgtcctcagcttgggc

SEQ ID NO: 1880 - DNA, 25 bp, Homo sapiens
tcctgtacttgtcctcagcttgggc

SEQ ID NO: 1881 - DNA, 25 bp, Homo sapiens
tggaccccactggctgagaatctgg

SEQ ID NO: 1882 - DNA, 25 bp, Homo sapiens
tgcctgctcctgtacttgtcctcag

SEQ ID NO: 1883 - DNA, 25 bp, Homo sapiens
tcctccatcacctgaaacactggac

SEQ ID NO: 1884 - DNA, 25 bp, Homo sapiens
tgcctgctcctgtacttgtcctcag

SEQ ID NO: 1885 - DNA, 25 bp, Homo sapiens
tgcctgctcctgtacttgtcctcag

SEQ ID NO: 1886 - DNA, 25 bp, Homo sapiens
tcctgtacttgtcctcagcttgggc

SEQ ID NO: 1887 - DNA, 25 bp, Homo sapiens
tgcctgctcctgtacttgtcctcag

SEQ ID NO: 1888 - DNA, 25 bp, Homo sapiens
tgcctgctcctgtacttgtcctcag

SEQ ID NO: 1889 - DNA, 25 bp, Homo sapiens
acttgtcctcagcttgggcttcttc

SEQ ID NO: 1890 - DNA, 25 bp, Homo sapiens
tcctgtacttgtcctcagcttgggc

SEQ ID NO: 1891 - DNA, 25 bp, Homo sapiens
acttgtcctcagcttgggcttcttc

SEQ ID NO: 1892 - DNA, 25 bp, Homo sapiens
gccccactggacaacactgattcct

SEQ ID NO: 1893 - DNA, 25 bp, Homo sapiens
acttgtcctcagcttgggcttcttc

SEQ ID NO: 1894 - DNA, 25 bp, Homo sapiens
tccttgtgcctgctcctgtacttgt

SEQ ID NO: 1895 - DNA, 25 bp, Homo sapiens
tcctgtacttgtcctcagcttgggc

SEQ ID NO: 1896 - DNA, 25 bp, Homo sapiens
aagcctatacgtttctgtggagtaa

SEQ ID NO: 1897 - DNA, 25 bp, Homo sapiens
tcctgtacttgtcctcagcttgggc

SEQ ID NO: 1898 - DNA, 25 bp, Homo sapiens
tcctgtacttgtcctcagcttgggc

SEQ ID NO: 1899 - DNA, 25 bp, Homo sapiens
tggaccccactggctgagaatctgg

SEQ ID NO: 1900 - DNA, 25 bp, Homo sapiens
tgcctgctcctgtacttgtcctcag

SEQ ID NO: 1901 - DNA, 25 bp, Homo sapiens
ttggacatctctagtgtagctgcca

SEQ ID NO: 1902 - DNA, 25 bp, Homo sapiens
cacccagctggtcctgtggatggga

SEQ ID NO: 1903 - DNA, 25 bp, Homo sapiens
tcctccatcacctgaaacactggac

SEQ ID NO: 1904 - DNA, 25 bp, Homo sapiens
gccccactggacaacactgattcct

SEQ ID NO: 1905 - DNA, 25 bp, Homo sapiens
acttgtcctcagcttgggcttcttc

SEQ ID NO: 1906 - DNA, 25 bp, Homo sapiens
aaatgtttccttgtgcctgctcctg

SEQ ID NO: 1907 - DNA, 25 bp, Homo sapiens
ttggacatctctagtgtagctgcca

SEQ ID NO: 1908 - DNA, 25 bp, Homo sapiens
tcctccatcacctgaaacactggac

SEQ ID NO: 1909 - DNA, 25 bp, Homo sapiens
tgcctgctcctgtacttgtcctcag

SEQ ID NO: 1910 - DNA, 25 bp, Homo sapiens
tcctccatcacctgaaacactggac

SEQ ID NO: 1911 - DNA, 25 bp, Homo sapiens
aagcctatacgtttctgtggagtaa

SEQ ID NO: 1912 - DNA, 25 bp, Homo sapiens
acttgtcctcagcttgggcttcttc

SEQ ID NO: 1913 - DNA, 25 bp, Homo sapiens
aagcctatacgtttctgtggagtaa

SEQ ID NO: 1914 - DNA, 25 bp, Homo sapiens
tccttgtgcctgctcctgtacttgt

SEQ ID NO: 1915 - DNA, 25 bp, Homo sapiens
aagcctatacgtttctgtggagtaa

SEQ ID NO: 1916 - DNA, 25 bp, Homo sapiens
tggaccccactggctgagaatctgg

SEQ ID NO: 1917 - DNA, 25 bp, Homo sapiens
tcctgtacttgtcctcagcttgggc

SEQ ID NO: 1918 - DNA, 25 bp, Homo sapiens
ttggacatctctagtgtagctgcca

SEQ ID NO: 1919 - DNA, 25 bp, Homo sapiens
tgcctgctcctgtacttgtcctcag

SEQ ID NO: 1920 - DNA, 25 bp, Homo sapiens
tcctccatcacctgaaacactggac

SEQ ID NO: 1921 - DNA, 25 bp, Homo sapiens
tcctgtacttgtcctcagcttgggc

SEQ ID NO: 1922 - DNA, 25 bp, Homo sapiens
acttgtcctcagcttgggcttcttc

SEQ ID NO: 1923 - DNA, 25 bp, Homo sapiens
tccttgtgcctgctcctgtacttgt

SEQ ID NO: 1924 - DNA, 25 bp, Homo sapiens
tggaccccactggctgagaatctgg

SEQ ID NO: 1925 - DNA, 25 bp, Homo sapiens
gccccactggacaacactgattcct

SEQ ID NO: 1926 - DNA, 25 bp, Homo sapiens
tgcctgctcctgtacttgtcctcag

SEQ ID NO: 1927 - DNA, 25 bp, Homo sapiens
tggaccccactggctgagaatctgg

SEQ ID NO: 1928 - DNA, 25 bp, Homo sapiens
aaatgtttccttgtgcctgctcctg

SEQ ID NO: 1929 - DNA, 25 bp, Homo sapiens
tggaccccactggctgagaatctgg

SEQ ID NO: 1930 - DNA, 25 bp, Homo sapiens
cacccagctggtcctgtggatggga

SEQ ID NO: 1931 - DNA, 25 bp, Homo sapiens
tggaccccactggctgagaatctgg

SEQ ID NO: 1932 - DNA, 25 bp, Homo sapiens
tcctgtacttgtcctcagcttgggc

SEQ ID NO: 1933 - DNA, 25 bp, Homo sapiens
tggaccccactggctgagaatctgg

SEQ ID NO: 1934 - DNA, 25 bp, Homo sapiens
tccttgtgcctgctcctgtacttgt

SEQ ID NO: 1935 - DNA, 25 bp, Homo sapiens
aagcctatacgtttctgtggagtaa

SEQ ID NO: 1936 - DNA, 25 bp, Homo sapiens
tccttgtgcctgctcctgtacttgt

SEQ ID NO: 1937 - DNA, 25 bp, Homo sapiens
gccccactggacaacactgattcct

SEQ ID NO: 1938 - DNA, 25 bp, Homo sapiens
aaatgtttccttgtgcctgctcctg

SEQ ID NO: 1939 - DNA, 25 bp, Homo sapiens
tgcctgctcctgtacttgtcctcag

SEQ ID NO: 1940 - DNA, 25 bp, Homo sapiens
tcctgtacttgtcctcagcttgggc

SEQ ID NO: 1941 - DNA, 25 bp, Homo sapiens
gccccactggacaacactgattcct

SEQ ID NO: 1942 - DNA, 25 bp, Homo sapiens
tcctccatcacctgaaacactggac

SEQ ID NO: 1943 - DNA, 25 bp, Homo sapiens
tcctgtacttgtcctcagcttgggc

SEQ ID NO: 1944 - DNA, 25 bp, Homo sapiens
tgcctgctcctgtacttgtcctcag

SEQ ID NO: 1945 - DNA, 25 bp, Homo sapiens
acttgtcctcagcttgggcttcttc

SEQ ID NO: 1946 - DNA, 25 bp, Homo sapiens
tcctccatcacctgaaacactggac

SEQ ID NO: 1947 - DNA, 25 bp, Homo sapiens
ttggacatctctagtgtagctgcca

SEQ ID NO: 1948 - DNA, 25 bp, Homo sapiens
cacccagctggtcctgtggatggga

SEQ ID NO: 1949 - DNA, 25 bp, Homo sapiens
tgcctgctcctgtacttgtcctcag

SEQ ID NO: 1950 - DNA, 25 bp, Homo sapiens
tggaccccactggctgagaatctgg

SEQ ID NO: 1951 - DNA, 25 bp, Homo sapiens
acttgtcctcagcttgggcttcttc

SEQ ID NO: 1952 - DNA, 25 bp, Homo sapiens
ttggacatctctagtgtagctgcca

SEQ ID NO: 1953 - DNA, 25 bp, Homo sapiens
acttgtcctcagcttgggcttcttc

SEQ ID NO: 1954 - DNA, 25 bp, Homo sapiens
tgcctgctcctgtacttgtcctcag

SEQ ID NO: 1955 - DNA, 25 bp, Homo sapiens
aagcctatacgtttctgtggagtaa

SEQ ID NO: 1956 - DNA, 25 bp, Homo sapiens
tgcctgctcctgtacttgtcctcag

SEQ ID NO: 1957 - DNA, 25 bp, Homo sapiens
acttgtcctcagcttgggcttcttc

SEQ ID NO: 1958 - DNA, 25 bp, Homo sapiens
aagcctatacgtttctgtggagtaa

SEQ ID NO: 1959 - DNA, 25 bp, Homo sapiens
gccccactggacaacactgattcct

SEQ ID NO: 1960 - DNA, 25 bp, Homo sapiens
tccttgtgcctgctcctgtacttgt

SEQ ID NO: 1961 - DNA, 25 bp, Homo sapiens
aaatgtttccttgtgcctgctcctg

SEQ ID NO: 1962 - DNA, 25 bp, Homo sapiens
ttggacatctctagtgtagctgcca

SEQ ID NO: 1963 - DNA, 25 bp, Homo sapiens
tcctccatcacctgaaacactggac

SEQ ID NO: 1964 - DNA, 25 bp, Homo sapiens
tcctccatcacctgaaacactggac

SEQ ID NO: 1965 - DNA, 25 bp, Homo sapiens
cacccagctggtcctgtggatggga

SEQ ID NO: 1966 - DNA, 25 bp, Homo sapiens
tggaccccactggctgagaatctgg

SEQ ID NO: 1967 - DNA, 25 bp, Homo sapiens
tcctccatcacctgaaacactggac

SEQ ID NO: 1968 - DNA, 25 bp, Homo sapiens
tgcctgctcctgtacttgtcctcag

SEQ ID NO: 1969 - DNA, 25 bp, Homo sapiens
aagcctatacgtttctgtggagtaa

SEQ ID NO: 1970 - DNA, 25 bp, Homo sapiens
ttggacatctctagtgtagctgcca

SEQ ID NO: 1971 - DNA, 25 bp, Homo sapiens
aagcctatacgtttctgtggagtaa

SEQ ID NO: 1972 - DNA, 25 bp, Homo sapiens
cacccagctggtcctgtggatggga

SEQ ID NO: 1973 - DNA, 25 bp, Homo sapiens
tggaccccactggctgagaatctgg

SEQ ID NO: 1974 - DNA, 25 bp, Homo sapiens
tgcctgctcctgtacttgtcctcag

SEQ ID NO: 1975 - DNA, 25 bp, Homo sapiens
acttgtcctcagcttgggcttcttc

SEQ ID NO: 1976 - DNA, 25 bp, Homo sapiens
tcctgtacttgtcctcagcttgggc

SEQ ID NO: 1977 - DNA, 25 bp, Homo sapiens
gccccactggacaacactgattcct

SEQ ID NO: 1978 - DNA, 25 bp, Homo sapiens
tcctgtacttgtcctcagcttgggc

SEQ ID NO: 1979 - DNA, 25 bp, Homo sapiens
tggaccccactggctgagaatctgg

SEQ ID NO: 1980 - DNA, 25 bp, Homo sapiens
ttggacatctctagtgtagctgcca

SEQ ID NO: 1981 - DNA, 25 bp, Homo sapiens
acttgtcctcagcttgggcttcttc

SEQ ID NO: 1982 - DNA, 25 bp, Homo sapiens
aaatgtttccttgtgcctgctcctg

SEQ ID NO: 1983 - DNA, 25 bp, Homo sapiens
acttgtcctcagcttgggcttcttc

SEQ ID NO: 1984 - DNA, 25 bp, Homo sapiens
aagcctatacgtttctgtggagtaa

SEQ ID NO: 1985 - DNA, 25 bp, Homo sapiens
acttgtcctcagcttgggcttcttc

SEQ ID NO: 1986 - DNA, 25 bp, Homo sapiens
tcctgtacttgtcctcagcttgggc

SEQ ID NO: 1987 - DNA, 25 bp, Homo sapiens
tcctgtacttgtcctcagcttgggc

SEQ ID NO: 1988 - DNA, 25 bp, Homo sapiens
aagcctatacgtttctgtggagtaa

SEQ ID NO: 1989 - DNA, 25 bp, Homo sapiens
tggaccccactggctgagaatctgg

SEQ ID NO: 1990 - DNA, 25 bp, Homo sapiens
gccccactggacaacactgattcct

SEQ ID NO: 1991 - DNA, 25 bp, Homo sapiens
aaatgtttccttgtgcctgctcctg

SEQ ID NO: 1992 - DNA, 25 bp, Homo sapiens
tccttgtgcctgctcctgtacttgt

SEQ ID NO: 1993 - DNA, 25 bp, Homo sapiens
gccccactggacaacactgattcct

SEQ ID NO: 1994 - DNA, 25 bp, Homo sapiens
tccttgtgcctgctcctgtacttgt

SEQ ID NO: 1995 - DNA, 25 bp, Homo sapiens
tccttgtgcctgctcctgtacttgt

SEQ ID NO: 1996 - DNA, 25 bp, Homo sapiens
tcctccatcacctgaaacactggac

SEQ ID NO: 1997 - DNA, 25 bp, Homo sapiens
aagcctatacgtttctgtggagtaa

SEQ ID NO: 1998 - DNA, 25 bp, Homo sapiens
tcctgtacttgtcctcagcttgggc

SEQ ID NO: 1999 - DNA, 25 bp, Homo sapiens
tcctccatcacctgaaacactggac

SEQ ID NO: 2000 - DNA, 25 bp, Homo sapiens
tggaccccactggctgagaatctgg

SEQ ID NO: 2001 - DNA, 25 bp, Homo sapiens
acttgtcctcagcttgggcttcttc

SEQ ID NO: 2002 - DNA, 25 bp, Homo sapiens
tgcctgctcctgtacttgtcctcag

SEQ ID NO: 2003 - DNA, 25 bp, Homo sapiens
tcctccatcacctgaaacactggac

SEQ ID NO: 2004 - DNA, 25 bp, Homo sapiens
tccttgtgcctgctcctgtacttgt

SEQ ID NO: 2005 - DNA, 25 bp, Homo sapiens
tcctgtacttgtcctcagcttgggc

SEQ ID NO: 2006 - DNA, 25 bp, Homo sapiens
tcctccatcacctgaaacactggac

SEQ ID NO: 2007 - DNA, 25 bp, Homo sapiens
acttgtcctcagcttgggcttcttc

SEQ ID NO: 2008 - DNA, 25 bp, Homo sapiens
gccccactggacaacactgattcct

SEQ ID NO: 2009 - DNA, 25 bp, Homo sapiens
aagcctatacgtttctgtggagtaa

SEQ ID NO: 2010 - DNA, 25 bp, Homo sapiens
tggaccccactggctgagaatctgg

SEQ ID NO: 2011 - DNA, 25 bp, Homo sapiens
cacccagctggtcctgtggatggga

SEQ ID NO: 2012 - DNA, 25 bp, Homo sapiens
tggaccccactggctgagaatctgg

SEQ ID NO: 2013 - DNA, 25 bp, Homo sapiens
aagcctatacgtttctgtggagtaa

SEQ ID NO: 2014 - DNA, 25 bp, Homo sapiens
tgcctgctcctgtacttgtcctcag

SEQ ID NO: 2015 - DNA, 25 bp, Homo sapiens
gccccactggacaacactgattcct

SEQ ID NO: 2016 - DNA, 25 bp, Homo sapiens
aagcctatacgtttctgtggagtaa

SEQ ID NO: 2017 - DNA, 25 bp, Homo sapiens
gccccactggacaacactgattcct

SEQ ID NO: 2018 - DNA, 25 bp, Homo sapiens
tcctgtacttgtcctcagcttgggc

SEQ ID NO: 2019 - DNA, 25 bp, Homo sapiens
acttgtcctcagcttgggcttcttc

SEQ ID NO: 2020 - DNA, 25 bp, Homo sapiens
gccccactggacaacactgattcct

SEQ ID NO: 2021 - DNA, 25 bp, Homo sapiens
tggaccccactggctgagaatctgg

SEQ ID NO: 2022 - DNA, 25 bp, Homo sapiens
tcctgtacttgtcctcagcttgggc

SEQ ID NO: 2023 - DNA, 25 bp, Homo sapiens
aagcctatacgtttctgtggagtaa

SEQ ID NO: 2024 - DNA, 25 bp, Homo sapiens
acttgtcctcagcttgggcttcttc

SEQ ID NO: 2025 - DNA, 25 bp, Homo sapiens
gccccactggacaacactgattcct

SEQ ID NO: 2026 - DNA, 25 bp, Homo sapiens
ttggacatctctagtgtagctgcca

SEQ ID NO: 2027 - DNA, 25 bp, Homo sapiens
tccttgtgcctgctcctgtacttgt

SEQ ID NO: 2028 - DNA, 25 bp, Homo sapiens
aaatgtttccttgtgcctgctcctg

SEQ ID NO: 2029 - DNA, 25 bp, Homo sapiens
cacccagctggtcctgtggatggga

SEQ ID NO: 2030 - DNA, 25 bp, Homo sapiens
aagcctatacgtttctgtggagtaa

SEQ ID NO: 2031 - DNA, 25 bp, Homo sapiens
tccttgtgcctgctcctgtacttgt

SEQ ID NO: 2032 - DNA, 25 bp, Homo sapiens
gccccactggacaacactgattcct

SEQ ID NO: 2033 - DNA, 25 bp, Homo sapiens
acttgtcctcagcttgggcttcttc

SEQ ID NO: 2034 - DNA, 25 bp, Homo sapiens
gccccactggacaacactgattcct

SEQ ID NO: 2035 - DNA, 25 bp, Homo sapiens
tggaccccactggctgagaatctgg

SEQ ID NO: 2036 - DNA, 25 bp, Homo sapiens
aagcctatacgtttctgtggagtaa

SEQ ID NO: 2037 - DNA, 25 bp, Homo sapiens
cacccagctggtcctgtggatggga

SEQ ID NO: 2038 - DNA, 25 bp, Homo sapiens
aaatgtttccttgtgcctgctcctg

SEQ ID NO: 2039 - DNA, 25 bp, Homo sapiens
tcctccatcacctgaaacactggac

SEQ ID NO: 2040 - DNA, 25 bp, Homo sapiens
tccttgtgcctgctcctgtacttgt

SEQ ID NO: 2041 - DNA, 25 bp, Homo sapiens
tcctccatcacctgaaacactggac

SEQ ID NO: 2042 - DNA, 25 bp, Homo sapiens
tcctgtacttgtcctcagcttgggc

SEQ ID NO: 2043 - DNA, 25 bp, Homo sapiens
aagcctatacgtttctgtggagtaa

SEQ ID NO: 2044 - DNA, 25 bp, Homo sapiens
aagcctatacgtttctgtggagtaa

SEQ ID NO: 2045 - DNA, 25 bp, Homo sapiens
acttgtcctcagcttgggcttcttc

SEQ ID NO: 2046 - DNA, 25 bp, Homo sapiens
tcctccatcacctgaaacactggac

SEQ ID NO: 2047 - DNA, 25 bp, Homo sapiens
tcctccatcacctgaaacactggac

SEQ ID NO: 2048 - DNA, 25 bp, Homo sapiens
tgcctgctcctgtacttgtcctcag

SEQ ID NO: 2049 - DNA, 25 bp, Homo sapiens
ttggacatctctagtgtagctgcca

SEQ ID NO: 2050 - DNA, 25 bp, Homo sapiens
acttgtcctcagcttgggcttcttc

SEQ ID NO: 2051 - DNA, 25 bp, Homo sapiens
ttggacatctctagtgtagctgcca

SEQ ID NO: 2052 - DNA, 25 bp, Homo sapiens
tcctgtacttgtcctcagcttgggc

SEQ ID NO: 2053 - DNA, 25 bp, Homo sapiens
tcctgtacttgtcctcagcttgggc

SEQ ID NO: 2054 - DNA, 25 bp, Homo sapiens
gccccactggacaacactgattcct

SEQ ID NO: 2055 - DNA, 25 bp, Homo sapiens
tggaccccactggctgagaatctgg

SEQ ID NO: 2056 - DNA, 25 bp, Homo sapiens
acttgtcctcagcttgggcttcttc

SEQ ID NO: 2057 - DNA, 25 bp, Homo sapiens
tggaccccactggctgagaatctgg

SEQ ID NO: 2058 - DNA, 25 bp, Homo sapiens
tcctgtacttgtcctcagcttgggc

SEQ ID NO: 2059 - DNA, 25 bp, Homo sapiens
gccccactggacaacactgattcct

SEQ ID NO: 2060 - DNA, 25 bp, Homo sapiens
aaatgtttccttgtgcctgctcctg

SEQ ID NO: 2061 - DNA, 25 bp, Homo sapiens
cacccagctggtcctgtggatggga

SEQ ID NO: 2062 - DNA, 25 bp, Homo sapiens
aaatgtttccttgtgcctgctcctg

SEQ ID NO: 2063 - DNA, 25 bp, Homo sapiens
ttggacatctctagtgtagctgcca

SEQ ID NO: 2064 - DNA, 25 bp, Homo sapiens
ttggacatctctagtgtagctgcca

SEQ ID NO: 2065 - DNA, 25 bp, Homo sapiens
ttggacatctctagtgtagctgcca

SEQ ID NO: 2066 - DNA, 25 bp, Homo sapiens
aagcctatacgtttctgtggagtaa

SEQ ID NO: 2067 - DNA, 25 bp, Homo sapiens
tgcctgctcctgtacttgtcctcag

SEQ ID NO: 2068 - DNA, 25 bp, Homo sapiens
tccttgtgcctgctcctgtacttgt

SEQ ID NO: 2069 - DNA, 25 bp, Homo sapiens
tggaccccactggctgagaatctgg

SEQ ID NO: 2070 - DNA, 25 bp, Homo sapiens
gccccactggacaacactgattcct

SEQ ID NO: 2071 - DNA, 25 bp, Homo sapiens
aagcctatacgtttctgtggagtaa

SEQ ID NO: 2072 - DNA, 25 bp, Homo sapiens
tcctccatcacctgaaacactggac

SEQ ID NO: 2073 - DNA, 25 bp, Homo sapiens
acttgtcctcagcttgggcttcttc

SEQ ID NO: 2074 - DNA, 25 bp, Homo sapiens
tgcctgctcctgtacttgtcctcag

SEQ ID NO: 2075 - DNA, 25 bp, Homo sapiens
tcctccatcacctgaaacactggac

SEQ ID NO: 2076 - DNA, 25 bp, Homo sapiens
tcctccatcacctgaaacactggac

SEQ ID NO: 2077 - DNA, 25 bp, Homo sapiens
acttgtcctcagcttgggcttcttc

SEQ ID NO: 2078 - DNA, 25 bp, Homo sapiens
tcctccatcacctgaaacactggac

SEQ ID NO: 2079 - DNA, 25 bp, Homo sapiens
ttggacatctctagtgtagctgcca

SEQ ID NO: 2080 - DNA, 25 bp, Homo sapiens
aaatgtttccttgtgcctgctcctg

SEQ ID NO: 2081 - DNA, 25 bp, Homo sapiens
tggaccccactggctgagaatctgg

SEQ ID NO: 2082 - DNA, 25 bp, Homo sapiens
tgcctgctcctgtacttgtcctcag

SEQ ID NO: 2083 - DNA, 25 bp, Homo sapiens
aaatgtttccttgtgcctgctcctg

SEQ ID NO: 2084 - DNA, 25 bp, Homo sapiens
tcctccatcacctgaaacactggac

SEQ ID NO: 2085 - DNA, 25 bp, Homo sapiens
tcctccatcacctgaaacactggac

SEQ ID NO: 2086 - DNA, 25 bp, Homo sapiens
acttgtcctcagcttgggcttcttc

SEQ ID NO: 2087 - DNA, 25 bp, Homo sapiens
tccttgtgcctgctcctgtacttgt

SEQ ID NO: 2088 - DNA, 25 bp, Homo sapiens
aaatgtttccttgtgcctgctcctg

SEQ ID NO: 2089 - DNA, 25 bp, Homo sapiens
cacccagctggtcctgtggatggga

SEQ ID NO: 2090 - DNA, 25 bp, Homo sapiens
aagcctatacgtttctgtggagtaa

SEQ ID NO: 2091 - DNA, 25 bp, Homo sapiens
tcctgtacttgtcctcagcttgggc

SEQ ID NO: 2092 - DNA, 25 bp, Homo sapiens
aagcctatacgtttctgtggagtaa

SEQ ID NO: 2093 - DNA, 25 bp, Homo sapiens
ttggacatctctagtgtagctgcca

SEQ ID NO: 2094 - DNA, 25 bp, Homo sapiens
aagcctatacgtttctgtggagtaa

SEQ ID NO: 2095 - DNA, 25 bp, Homo sapiens
acttgtcctcagcttgggcttcttc

SEQ ID NO: 2096 - DNA, 25 bp, Homo sapiens
tggaccccactggctgagaatctgg

SEQ ID NO: 2097 - DNA, 25 bp, Homo sapiens
tgcctgctcctgtacttgtcctcag

SEQ ID NO: 2098 - DNA, 25 bp, Homo sapiens
tcctgtacttgtcctcagcttgggc

SEQ ID NO: 2099 - DNA, 25 bp, Homo sapiens
tgcctgctcctgtacttgtcctcag

SEQ ID NO: 2100 - DNA, 25 bp, Homo sapiens
aaatgtttccttgtgcctgctcctg

SEQ ID NO: 2101 - DNA, 25 bp, Homo sapiens
tgcctgctcctgtacttgtcctcag

SEQ ID NO: 2102 - DNA, 25 bp, Homo sapiens
ttggacatctctagtgtagctgcca

SEQ ID NO: 2103 - DNA, 25 bp, Homo sapiens
cacccagctggtcctgtggatggga

SEQ ID NO: 2104 - DNA, 25 bp, Homo sapiens
acttgtcctcagcttgggcttcttc

SEQ ID NO: 2105 - DNA, 25 bp, Homo sapiens
tcctccatcacctgaaacactggac

SEQ ID NO: 2106 - DNA, 25 bp, Homo sapiens
tcctgtacttgtcctcagcttgggc

SEQ ID NO: 2107 - DNA, 25 bp, Homo sapiens
tggaccccactggctgagaatctgg

SEQ ID NO: 2108 - DNA, 25 bp, Homo sapiens
aagcctatacgtttctgtggagtaa

SEQ ID NO: 2109 - DNA, 25 bp, Homo sapiens
tccttgtgcctgctcctgtacttgt

SEQ ID NO: 2110 - DNA, 25 bp, Homo sapiens
tggaccccactggctgagaatctgg

SEQ ID NO: 2111 - DNA, 25 bp, Homo sapiens
tggaccccactggctgagaatctgg

SEQ ID NO: 2112 - DNA, 25 bp, Homo sapiens
aagcctatacgtttctgtggagtaa

SEQ ID NO: 2113 - DNA, 25 bp, Homo sapiens
aaatgtttccttgtgcctgctcctg

SEQ ID NO: 2114 - DNA, 25 bp, Homo sapiens
tcctgtacttgtcctcagcttgggc

SEQ ID NO: 2115 - DNA, 25 bp, Homo sapiens
ttggacatctctagtgtagctgcca

SEQ ID NO: 2116 - DNA, 25 bp, Homo sapiens
aagcctatacgtttctgtggagtaa

SEQ ID NO: 2117 - DNA, 25 bp, Homo sapiens
tgcctgctcctgtacttgtcctcag

SEQ ID NO: 2118 - DNA, 25 bp, Homo sapiens
acttgtcctcagcttgggcttcttc

SEQ ID NO: 2119 - DNA, 25 bp, Homo sapiens
acttgtcctcagcttgggcttcttc

SEQ ID NO: 2120 - DNA, 25 bp, Homo sapiens
tgcctgctcctgtacttgtcctcag

SEQ ID NO: 2121 - DNA, 25 bp, Homo sapiens
gccccactggacaacactgattcct

SEQ ID NO: 2122 - DNA, 25 bp, Homo sapiens
aagcctatacgtttctgtggagtaa

SEQ ID NO: 2123 - DNA, 25 bp, Homo sapiens
tcctgtacttgtcctcagcttgggc

SEQ ID NO: 2124 - DNA, 25 bp, Homo sapiens
cacccagctggtcctgtggatggga

SEQ ID NO: 2125 - DNA, 25 bp, Homo sapiens
gccccactggacaacactgattcct

SEQ ID NO: 2126 - DNA, 25 bp, Homo sapiens
ttggacatctctagtgtagctgcca

SEQ ID NO: 2127 - DNA, 25 bp, Homo sapiens
tcctgtacttgtcctcagcttgggc

SEQ ID NO: 2128 - DNA, 25 bp, Homo sapiens
tcctccatcacctgaaacactggac

SEQ ID NO: 2129 - DNA, 25 bp, Homo sapiens
cacccagctggtcctgtggatggga

SEQ ID NO: 2130 - DNA, 25 bp, Homo sapiens
aaatgtttccttgtgcctgctcctg

SEQ ID NO: 2131 - DNA, 25 bp, Homo sapiens
tccttgtgcctgctcctgtacttgt

SEQ ID NO: 2132 - DNA, 25 bp, Homo sapiens
ttggacatctctagtgtagctgcca

SEQ ID NO: 2133 - DNA, 25 bp, Homo sapiens
tgcctgctcctgtacttgtcctcag

SEQ ID NO: 2134 - DNA, 25 bp, Homo sapiens
tcctccatcacctgaaacactggac

SEQ ID NO: 2135 - DNA, 25 bp, Homo sapiens
acttgtcctcagcttgggcttcttc

SEQ ID NO: 2136 - DNA, 25 bp, Homo sapiens
ttggacatctctagtgtagctgcca

SEQ ID NO: 2137 - DNA, 25 bp, Homo sapiens
acttgtcctcagcttgggcttcttc

SEQ ID NO: 2138 - DNA, 25 bp, Homo sapiens
aagcctatacgtttctgtggagtaa

SEQ ID NO: 2139 - DNA, 25 bp, Homo sapiens
gccccactggacaacactgattcct

SEQ ID NO: 2140 - DNA, 25 bp, Homo sapiens
tcctgtacttgtcctcagcttgggc

SEQ ID NO: 2141 - DNA, 25 bp, Homo sapiens
ttggacatctctagtgtagctgcca

SEQ ID NO: 2142 - DNA, 25 bp, Homo sapiens
aagcctatacgtttctgtggagtaa

SEQ ID NO: 2143 - DNA, 25 bp, Homo sapiens
ttggacatctctagtgtagctgcca

SEQ ID NO: 2144 - DNA, 25 bp, Homo sapiens
acttgtcctcagcttgggcttcttc

SEQ ID NO: 2145 - DNA, 25 bp, Homo sapiens
tggaccccactggctgagaatctgg

SEQ ID NO: 2146 - DNA, 25 bp, Homo sapiens
ttggacatctctagtgtagctgcca

SEQ ID NO: 2147 - DNA, 25 bp, Homo sapiens
tcctccatcacctgaaacactggac

SEQ ID NO: 2148 - DNA, 25 bp, Homo sapiens
aaatgtttccttgtgcctgctcctg

SEQ ID NO: 2149 - DNA, 25 bp, Homo sapiens
tgcctgctcctgtacttgtcctcag

SEQ ID NO: 2150 - DNA, 25 bp, Homo sapiens
tcctgtacttgtcctcagcttgggc

SEQ ID NO: 2151 - DNA, 25 bp, Homo sapiens
tcctgtacttgtcctcagcttgggc

SEQ ID NO: 2152 - DNA, 25 bp, Homo sapiens
tcctgtacttgtcctcagcttgggc

SEQ ID NO: 2153 - DNA, 25 bp, Homo sapiens
tcctgtacttgtcctcagcttgggc

SEQ ID NO: 2154 - DNA, 25 bp, Homo sapiens
tgcctgctcctgtacttgtcctcag

SEQ ID NO: 2155 - DNA, 25 bp, Homo sapiens
tggaccccactggctgagaatctgg

SEQ ID NO: 2156 - DNA, 25 bp, Homo sapiens
tcctccatcacctgaaacactggac

SEQ ID NO: 2157 - DNA, 25 bp, Homo sapiens
tcctccatcacctgaaacactggac

SEQ ID NO: 2158 - DNA, 25 bp, Homo sapiens
gccccactggacaacactgattcct

SEQ ID NO: 2159 - DNA, 25 bp, Homo sapiens
ttggacatctctagtgtagctgcca

SEQ ID NO: 2160 - DNA, 25 bp, Homo sapiens
acttgtcctcagcttgggcttcttc

SEQ ID NO: 2161 - DNA, 25 bp, Homo sapiens
tccttgtgcctgctcctgtacttgt

SEQ ID NO: 2162 - DNA, 25 bp, Homo sapiens
tcctgtacttgtcctcagcttgggc

SEQ ID NO: 2163 - DNA, 25 bp, Homo sapiens
tgcctgctcctgtacttgtcctcag

SEQ ID NO: 2164 - DNA, 25 bp, Homo sapiens
tcctgtacttgtcctcagcttgggc

SEQ ID NO: 2165 - DNA, 25 bp, Homo sapiens
tccttgtgcctgctcctgtacttgt

SEQ ID NO: 2166 - DNA, 25 bp, Homo sapiens
cacccagctggtcctgtggatggga

SEQ ID NO: 2167 - DNA, 25 bp, Homo sapiens
ttggacatctctagtgtagctgcca

SEQ ID NO: 2168 - DNA, 25 bp, Homo sapiens
tcctccatcacctgaaacactggac

SEQ ID NO: 2169 - DNA, 25 bp, Homo sapiens
tcctgtacttgtcctcagcttgggc

SEQ ID NO: 2170 - DNA, 25 bp, Homo sapiens
aaatgtttccttgtgcctgctcctg

SEQ ID NO: 2171 - DNA, 25 bp, Homo sapiens
tggaccccactggctgagaatctgg

SEQ ID NO: 2172 - DNA, 25 bp, Homo sapiens
ttggacatctctagtgtagctgcca

SEQ ID NO: 2173 - DNA, 25 bp, Homo sapiens
gccccactggacaacactgattcct

SEQ ID NO: 2174 - DNA, 25 bp, Homo sapiens
aaatgtttccttgtgcctgctcctg

SEQ ID NO: 2175 - DNA, 25 bp, Homo sapiens
aagcctatacgtttctgtggagtaa

SEQ ID NO: 2176 - DNA, 25 bp, Homo sapiens
ttggacatctctagtgtagctgcca

SEQ ID NO: 2177 - DNA, 25 bp, Homo sapiens
aaatgtttccttgtgcctgctcctg

SEQ ID NO: 2178 - DNA, 25 bp, Homo sapiens
tccttgtgcctgctcctgtacttgt

SEQ ID NO: 2179 - DNA, 25 bp, Homo sapiens
cacccagctggtcctgtggatggga

SEQ ID NO: 2180 - DNA, 25 bp, Homo sapiens
cacccagctggtcctgtggatggga

SEQ ID NO: 2181 - DNA, 25 bp, Homo sapiens
tggaccccactggctgagaatctgg

SEQ ID NO: 2182 - DNA, 25 bp, Homo sapiens
aaatgtttccttgtgcctgctcctg

SEQ ID NO: 2183 - DNA, 25 bp, Homo sapiens
gccccactggacaacactgattcct

SEQ ID NO: 2184 - DNA, 25 bp, Homo sapiens
tcctgtacttgtcctcagcttgggc

SEQ ID NO: 2185 - DNA, 25 bp, Homo sapiens
tcctgtacttgtcctcagcttgggc

SEQ ID NO: 2186 - DNA, 25 bp, Homo sapiens
tcctccatcacctgaaacactggac

SEQ ID NO: 2187 - DNA, 25 bp, Homo sapiens
aagcctatacgtttctgtggagtaa

SEQ ID NO: 2188 - DNA, 25 bp, Homo sapiens
tggaccccactggctgagaatctgg

SEQ ID NO: 2189 - DNA, 25 bp, Homo sapiens
aagcctatacgtttctgtggagtaa

SEQ ID NO: 2190 - DNA, 25 bp, Homo sapiens
cacccagctggtcctgtggatggga

SEQ ID NO: 2191 - DNA, 25 bp, Homo sapiens
gccccactggacaacactgattcct

SEQ ID NO: 2192 - DNA, 25 bp, Homo sapiens
tccttgtgcctgctcctgtacttgt

SEQ ID NO: 2193 - DNA, 25 bp, Homo sapiens
aaatgtttccttgtgcctgctcctg

SEQ ID NO: 2194 - DNA, 25 bp, Homo sapiens
aaatgtttccttgtgcctgctcctg

SEQ ID NO: 2195 - DNA, 25 bp, Homo sapiens
cacccagctggtcctgtggatggga

SEQ ID NO: 2196 - DNA, 25 bp, Homo sapiens
tcctccatcacctgaaacactggac

SEQ ID NO: 2197 - DNA, 25 bp, Homo sapiens
aaatgtttccttgtgcctgctcctg

SEQ ID NO: 2198 - DNA, 25 bp, Homo sapiens
aagcctatacgtttctgtggagtaa

SEQ ID NO: 2199 - DNA, 25 bp, Homo sapiens
ttggacatctctagtgtagctgcca

SEQ ID NO: 2200 - DNA, 25 bp, Homo sapiens
acttgtcctcagcttgggcttcttc

SEQ ID NO: 2201 - DNA, 25 bp, Homo sapiens
tggaccccactggctgagaatctgg

SEQ ID NO: 2202 - DNA, 25 bp, Homo sapiens
tggaccccactggctgagaatctgg

SEQ ID NO: 2203 - DNA, 25 bp, Homo sapiens
aagcctatacgtttctgtggagtaa

SEQ ID NO: 2204 - DNA, 25 bp, Homo sapiens
tcctccatcacctgaaacactggac

SEQ ID NO: 2205 - DNA, 25 bp, Homo sapiens
gccccactggacaacactgattcct

SEQ ID NO: 2206 - DNA, 25 bp, Homo sapiens
aagcctatacgtttctgtggagtaa

SEQ ID NO: 2207 - DNA, 25 bp, Homo sapiens
gccccactggacaacactgattcct

SEQ ID NO: 2208 - DNA, 25 bp, Homo sapiens
aagcctatacgtttctgtggagtaa

SEQ ID NO: 2209 - DNA, 25 bp, Homo sapiens
tcctccatcacctgaaacactggac

SEQ ID NO: 2210 - DNA, 25 bp, Homo sapiens
gccccactggacaacactgattcct

SEQ ID NO: 2211 - DNA, 25 bp, Homo sapiens
gccccactggacaacactgattcct

SEQ ID NO: 2212 - DNA, 25 bp, Homo sapiens
tgcctgctcctgtacttgtcctcag

SEQ ID NO: 2213 - DNA, 25 bp, Homo sapiens
tggaccccactggctgagaatctgg

SEQ ID NO: 2214 - DNA, 25 bp, Homo sapiens
ttggacatctctagtgtagctgcca

SEQ ID NO: 2215 - DNA, 25 bp, Homo sapiens
tccttgtgcctgctcctgtacttgt

SEQ ID NO: 2216 - DNA, 25 bp, Homo sapiens
cacccagctggtcctgtggatggga

SEQ ID NO: 2217 - DNA, 25 bp, Homo sapiens
tccttgtgcctgctcctgtacttgt

SEQ ID NO: 2218 - DNA, 25 bp, Homo sapiens
aagcctatacgtttctgtggagtaa

SEQ ID NO: 2219 - DNA, 25 bp, Homo sapiens
tcctccatcacctgaaacactggac

SEQ ID NO: 2220 - DNA, 25 bp, Homo sapiens
tggaccccactggctgagaatctgg

SEQ ID NO: 2221 - DNA, 25 bp, Homo sapiens
tccttgtgcctgctcctgtacttgt

SEQ ID NO: 2222 - DNA, 25 bp, Homo sapiens
tggaccccactggctgagaatctgg

SEQ ID NO: 2223 - DNA, 25 bp, Homo sapiens
tgcctgctcctgtacttgtcctcag

SEQ ID NO: 2224 - DNA, 25 bp, Homo sapiens
gccccactggacaacactgattcct

SEQ ID NO: 2225 - DNA, 25 bp, Homo sapiens
tggaccccactggctgagaatctgg

SEQ ID NO: 2226 - DNA, 25 bp, Homo sapiens
tgcctgctcctgtacttgtcctcag

SEQ ID NO: 2227 - DNA, 25 bp, Homo sapiens
acttgtcctcagcttgggcttcttc

SEQ ID NO: 2228 - DNA, 25 bp, Homo sapiens
ttggacatctctagtgtagctgcca

SEQ ID NO: 2229 - DNA, 25 bp, Homo sapiens
cacccagctggtcctgtggatggga

SEQ ID NO: 2230 - DNA, 25 bp, Homo sapiens
tgcctgctcctgtacttgtcctcag

SEQ ID NO: 2231 - DNA, 25 bp, Homo sapiens
tgcctgctcctgtacttgtcctcag

SEQ ID NO: 2232 - DNA, 25 bp, Homo sapiens
tgcctgctcctgtacttgtcctcag

SEQ ID NO: 2233 - DNA, 25 bp, Homo sapiens
gccccactggacaacactgattcct

SEQ ID NO: 2234 - DNA, 25 bp, Homo sapiens
ttggacatctctagtgtagctgcca

SEQ ID NO: 2235 - DNA, 25 bp, Homo sapiens
aagcctatacgtttctgtggagtaa

SEQ ID NO: 2236 - DNA, 25 bp, Homo sapiens
ttggacatctctagtgtagctgcca

SEQ ID NO: 2237 - DNA, 25 bp, Homo sapiens
acttgtcctcagcttgggcttcttc

SEQ ID NO: 2238 - DNA, 25 bp, Homo sapiens
aaatgtttccttgtgcctgctcctg

SEQ ID NO: 2239 - DNA, 25 bp, Homo sapiens
aagcctatacgtttctgtggagtaa

SEQ ID NO: 2240 - DNA, 25 bp, Homo sapiens
tccttgtgcctgctcctgtacttgt

SEQ ID NO: 2241 - DNA, 25 bp, Homo sapiens
tggaccccactggctgagaatctgg

SEQ ID NO: 2242 - DNA, 25 bp, Homo sapiens
ttggacatctctagtgtagctgcca

SEQ ID NO: 2243 - DNA, 25 bp, Homo sapiens
aagcctatacgtttctgtggagtaa

SEQ ID NO: 2244 - DNA, 25 bp, Homo sapiens
acttgtcctcagcttgggcttcttc

SEQ ID NO: 2245 - DNA, 25 bp, Homo sapiens
tccttgtgcctgctcctgtacttgt

SEQ ID NO: 2246 - DNA, 25 bp, Homo sapiens
cacccagctggtcctgtggatggga

SEQ ID NO: 2247 - DNA, 25 bp, Homo sapiens
tcctccatcacctgaaacactggac

SEQ ID NO: 2248 - DNA, 25 bp, Homo sapiens
ttggacatctctagtgtagctgcca

SEQ ID NO: 2249 - DNA, 25 bp, Homo sapiens
aagcctatacgtttctgtggagtaa

SEQ ID NO: 2250 - DNA, 25 bp, Homo sapiens
tcctccatcacctgaaacactggac

SEQ ID NO: 2251 - DNA, 25 bp, Homo sapiens
acttgtcctcagcttgggcttcttc

SEQ ID NO: 2252 - DNA, 25 bp, Homo sapiens
acttgtcctcagcttgggcttcttc

SEQ ID NO: 2253 - DNA, 25 bp, Homo sapiens
tccttgtgcctgctcctgtacttgt

SEQ ID NO: 2254 - DNA, 25 bp, Homo sapiens
tggaccccactggctgagaatctgg

SEQ ID NO: 2255 - DNA, 25 bp, Homo sapiens
tcctgtacttgtcctcagcttgggc

SEQ ID NO: 2256 - DNA, 25 bp, Homo sapiens
ttggacatctctagtgtagctgcca

SEQ ID NO: 2257 - DNA, 25 bp, Homo sapiens
gccccactggacaacactgattcct

SEQ ID NO: 2258 - DNA, 25 bp, Homo sapiens
cacccagctggtcctgtggatggga

SEQ ID NO: 2259 - DNA, 25 bp, Homo sapiens
gccccactggacaacactgattcct

SEQ ID NO: 2260 - DNA, 25 bp, Homo sapiens
tcctccatcacctgaaacactggac

SEQ ID NO: 2261 - DNA, 25 bp, Homo sapiens
cacccagctggtcctgtggatggga

SEQ ID NO: 2262 - DNA, 25 bp, Homo sapiens
tccttgtgcctgctcctgtacttgt

SEQ ID NO: 2263 - DNA, 25 bp, Homo sapiens
tcctgtacttgtcctcagcttgggc

SEQ ID NO: 2264 - DNA, 25 bp, Homo sapiens
aaatgtttccttgtgcctgctcctg

SEQ ID NO: 2265 - DNA, 25 bp, Homo sapiens
aagcctatacgtttctgtggagtaa

SEQ ID NO: 2266 - DNA, 25 bp, Homo sapiens
tcctccatcacctgaaacactggac

SEQ ID NO: 2267 - DNA, 25 bp, Homo sapiens
acttgtcctcagcttgggcttcttc

SEQ ID NO: 2268 - DNA, 25 bp, Homo sapiens
tccttgtgcctgctcctgtacttgt

SEQ ID NO: 2269 - DNA, 25 bp, Homo sapiens
tggaccccactggctgagaatctgg

SEQ ID NO: 2270 - DNA, 25 bp, Homo sapiens
tcctgtacttgtcctcagcttgggc

SEQ ID NO: 2271 - DNA, 25 bp, Homo sapiens
ttggacatctctagtgtagctgcca

SEQ ID NO: 2272 - DNA, 25 bp, Homo sapiens
tggaccccactggctgagaatctgg

SEQ ID NO: 2273 - DNA, 25 bp, Homo sapiens
tcctccatcacctgaaacactggac

SEQ ID NO: 2274 - DNA, 25 bp, Homo sapiens
tcctccatcacctgaaacactggac

SEQ ID NO: 2275 - DNA, 25 bp, Homo sapiens
acttgtcctcagcttgggcttcttc

SEQ ID NO: 2276 - DNA, 25 bp, Homo sapiens
cacccagctggtcctgtggatggga

SEQ ID NO: 2277 - DNA, 25 bp, Homo sapiens
gccccactggacaacactgattcct

SEQ ID NO: 2278 - DNA, 25 bp, Homo sapiens
aaatgtttccttgtgcctgctcctg

SEQ ID NO: 2279 - DNA, 25 bp, Homo sapiens
acttgtcctcagcttgggcttcttc

SEQ ID NO: 2280 - DNA, 25 bp, Homo sapiens
tgcctgctcctgtacttgtcctcag

SEQ ID NO: 2281 - DNA, 40 bp, Homo sapiens
gagggctggagaggttgggtgcgcttgtgcgtttcacttt

SEQ ID NO: 2282 - DNA, 40 bp, Homo sapiens
gccctgaagctccggactacagctcccaggcctctccaag

SEQ ID NO: 2283 - DNA, 40 bp, Homo sapiens
tgttggcctagttctgtgtggaagactagtgattttgttg

SEQ ID NO: 2284 - DNA, 40 bp, Homo sapiens
gtatttacctagttgtaatgtgggttgccatggtgttttg

SEQ ID NO: 2285 - DNA, 40 bp, Homo sapiens
aacgagtaaaaggcgtacatgggagcgcggggcggcagag

SEQ ID NO: 2286 - DNA, 40 bp, Homo sapiens
ttatgacgaatcatacagggacatccagtttttcagtatc

SEQ ID NO: 2287 - DNA, 40 bp, Homo sapiens
ggccaccacagacaccaacaagttcagtccgtttctgcag

SEQ ID NO: 2288 - DNA, 40 bp, Homo sapiens
tattagctgagggagggctggaggcggctgcattccgact

SEQ ID NO: 2289 - DNA, 40 bp, Homo sapiens
cgcatgtcctggccctcgtccttccatggcactggcaccg

SEQ ID NO: 2290 - DNA, 40 bp, Homo sapiens
gatctaaaggtccctggttcgatcccgggtttcggcacca

SEQ ID NO: 2291 - DNA, 40 bp, Homo sapiens
tatttattacaaggtccttcttccccgtaaaactttgtcc

SEQ ID NO: 2292 - DNA, 40 bp, Homo sapiens
aacgatactaaactgtttttgcgatgtgttcctaatatgc

SEQ ID NO: 2293 - DNA, 40 bp, Homo sapiens
ttaatgctaatcgtgataggggtttttgcctccaactgac

SEQ ID NO: 2294 - DNA, 40 bp, Homo sapiens
gatctcatgcagtcattctccaaaagaaagcactttctgt

SEQ ID NO: 2295 - DNA, 40 bp, Homo sapiens
accatcgaccgttgattgtaccctatggctaaccatcatc

SEQ ID NO: 2296 - DNA, 40 bp, Homo sapiens
atacaattaaggcacgcggtgaatgccaagaatggggctg

SEQ ID NO: 2297 - DNA, 40 bp, Homo sapiens
gaaagatgctaaactatttttgcgatgtgttcctaatatg

SEQ ID NO: 2298 - DNA, 40 bp, Homo sapiens
ctggagataatgattctgcatttctaattaactcccaggt

SEQ ID NO: 2299 - DNA, 40 bp, Homo sapiens
gtctcacacagaaatcgcacccgtcaccttggcctactta

SEQ ID NO: 2300 - DNA, 40 bp, Homo sapiens
cccataaagtagaaagcactactaacagcactggagggtg

SEQ ID NO: 2301 - DNA, 40 bp, Homo sapiens
gagtgtcagtttgtcaaataccccaagtgcggcacatgct

SEQ ID NO: 2302 - DNA, 40 bp, Homo sapiens
tcctcctcctccttttcgttccggctccctggctggctcc

SEQ ID NO: 2303 - DNA, 40 bp, Homo sapiens
ctgtttcatacttgaggagaaattatccttggtgtgttcg

SEQ ID NO: 2304 - DNA, 40 bp, Homo sapiens
cacctggctctgagaactgaattccataggctgtgagctc

SEQ ID NO: 2305 - DNA, 40 bp, Homo sapiens
tctagcgacagagtggttcaattccacctttcgggcgcca

SEQ ID NO: 2306 - DNA, 40 bp, Homo sapiens
aacattcattgctgtcggtgggttgaactgtgtggacaag

SEQ ID NO: 2307 - DNA, 40 bp, Homo sapiens; identical to SEQ ID NO: 2293

SEQ ID NO: 2308 - DNA, 40 bp, Homo sapiens
gactatggaagccagtgtgtggaaatgcttctgctagatt

SEQ ID NO: 2309 - DNA, 40 bp, Homo sapiens
cctgttgccacaaacccgtagatccgaacttgtggtatta

SEQ ID NO: 2310 - DNA, 40 bp, Homo sapiens
agctggtgttgtgaatcaggccgttgccaatcagagaacg

SEQ ID NO: 2311 - DNA, 40 bp, Homo sapiens
ttctaccacagggtagaaccacggacaggataccggggca

SEQ ID NO: 2312 - DNA, 40 bp, Homo sapiens
tgagaactgaattccatgggttgtgtcagtgtcagacctc

SEQ ID NO: 2313 - DNA, 40 bp, Homo sapiens
attaaaaatgattggtacgtctgtgggtagagtactgcat

SEQ ID NO: 2314 - DNA, 40 bp, Homo sapiens
cacctggcactgagaactgaattccataggctgtgagctc

SEQ ID NO: 2315 - DNA, 40 bp, Homo sapiens
attagagactcgttaagagaaggtgagaagggctcagtaa

SEQ ID NO: 2316 - DNA, 40 bp, Homo sapiens
gtgtgtatacttatgtgtgtgtatgtgtgagtgtgaatat

SEQ ID NO: 2317 - DNA, 40 bp, Homo sapiens
aattgtgacaactgagtgggaggtttgtgtgatgattatc

SEQ ID NO: 2318 - DNA, 40 bp, Homo sapiens
agtaaggaagcaatcagcaagtatactgccctagaagtgc

SEQ ID NO: 2319 - DNA, 40 bp, Homo sapiens
tgaggcctgttgccacaaacccgtagatccgaacttgtgg

SEQ ID NO: 2320 - DNA, 40 bp, Homo sapiens
gatgtttgggaaacaatgggagtgagagaatgggagagct

SEQ ID NO: 2321 - DNA, 40 bp, Homo sapiens
gccctggcggaacgctgagaagacagtcgaacttgactat

SEQ ID NO: 2322 - DNA, 40 bp, Homo sapiens; identical to SEQ ID NO: 2290

SEQ ID NO: 2323 - DNA, 40 bp, Homo sapiens
gtcatgctgccaccagcaggcagagaagaagcagaagaac

SEQ ID NO: 2324 - DNA, 40 bp, Homo sapiens
aaaaatcccagcggccacctttcctccctgccccattggg

SEQ ID NO: 2325 - DNA, 40 bp, Homo sapiens
atggtagagcgctcgctttgcttgcgagaggtagcgggat

SEQ ID NO: 2326 - DNA, 40 bp, Homo sapiens
caaacatcatgtgacgtctgtggagcggcggcggcggcgg

SEQ ID NO: 2327 - DNA, 40 bp, Homo sapiens
gctgccccctcccttagcaacgtggccccggcgttccaaa

SEQ ID NO: 2328 - DNA, 40 bp, Homo sapiens
ggcctcatgctgccaagggctggcaagaagtccctgcttg

SEQ ID NO: 2329 - DNA, 40 bp, Homo sapiens
ggaagtggagcaaatggatggaaagcaatttttggaagat

SEQ ID NO: 2330 - DNA, 40 bp, Homo sapiens
caataaatgtgcctataaaggcgccggctccggggcgcgg

SEQ ID NO: 2331 - DNA, 40 bp, Homo sapiens
aacaactttgtgctggtgccggggaagtttgtgtctccta

SEQ ID NO: 2332 - DNA, 40 bp, Homo sapiens
tccggatggagcgtgggttcgaatcccacttctgacacca

SEQ ID NO: 2333 - DNA, 40 bp, Homo sapiens
ctatattggaccgcagcgctgagagcttttgtgtttaatg

SEQ ID NO: 2334 - DNA, 40 bp, Homo sapiens; identical to SEQ ID NO: 2284

SEQ ID NO: 2335 - DNA, 40 bp, Homo sapiens; identical to SEQ ID NO: 2285

SEQ ID NO: 2336 - DNA, 40 bp, Homo sapiens
aggccaaggtgacgggtgcgatttctgtgtgagacaattc

SEQ ID NO: 2337 - DNA, 40 bp, Homo sapiens
ggagccctgtctgcaaagagtggtgcgtgtgcgtgtgtga

SEQ ID NO: 2338 - DNA, 40 bp, Homo sapiens; identical to SEQ ID NO: 2287

SEQ ID NO: 2339 - DNA, 40 bp, Homo sapiens; identical to SEQ ID NO: 2288

SEQ ID NO: 2340 - DNA, 40 bp, Homo sapiens; identical to SEQ ID NO: 2300

SEQ ID NO: 2341 - DNA, 40 bp, Homo sapiens
ggccgcagcaacctcggttcgtatccgagtcacggcacca

SEQ ID NO: 2342 - DNA, 40 bp, Homo sapiens
acgcgaaaggtccccggttcgaaaccgggcggaaacacca

SEQ ID NO: 2343 - DNA, 40 bp, Homo sapiens; identical to SEQ ID NO: 2302

SEQ ID NO: 2344 - DNA, 40 bp, Homo sapiens
aaaatggcggcgggaaaagcgagcggcgagagcgaggagg

SEQ ID NO: 2345 - DNA, 40 bp, Homo sapiens; identical to SEQ ID NO: 2290

SEQ ID NO: 2346 - DNA, 40 bp, Homo sapiens
tgtgtgttgcgggggtgggggccggtgaaagtgatttgat

SEQ ID NO: 2347 - DNA, 40 bp, Homo sapiens
cgaaacattcgcggtgcacttctttttcagtatcctattc

SEQ ID NO: 2348 - DNA, 40 bp, Homo sapiens
ttccgtggttcctgaagagatggtagactatggaacgtag

SEQ ID NO: 2349 - DNA, 40 bp, Homo sapiens; identical to SEQ ID NO: 2306

SEQ ID NO: 2350 - DNA, 40 bp, Homo sapiens
ccaggtcttggagtaggtcattgggtggatcctctatttc

SEQ ID NO: 2351 - DNA, 40 bp, Homo sapiens; identical to SEQ ID NO: 2292

SEQ ID NO: 2352 - DNA, 40 bp, Homo sapiens; identical to SEQ ID NO: 2293

SEQ ID NO: 2353 - DNA, 40 bp, Homo sapiens
aagctcccaaattagctttttaaatagaagctgagagtta

SEQ ID NO: 2354 - DNA, 40 bp, Homo sapiens
taaacatagaggaaatttcacgttttcagtgtcaaatgct

SEQ ID NO: 2355 - DNA, 40 bp, Homo sapiens
gacgaatgttgctcggtgaaccccttttcggtatcaaatt

SEQ ID NO: 2356 - DNA, 40 bp, Homo sapiens; identical to SEQ ID NO: 2296

SEQ ID NO: 2357 - DNA, 40 bp, Homo sapiens
gtggtacttgaagataggttatccgtgttgccttcgcttt

SEQ ID NO: 2358 - DNA, 40 bp, Homo sapiens
gtgacgaaacaaacatggtgcacttctttttcggtatcaa

SEQ ID NO: 2359 - DNA, 40 bp, Homo sapiens
cagagtgccttcttttggagcgttactgtttgagaaaaac

SEQ ID NO: 2360 - DNA, 40 bp, Homo sapiens
gtgtttatttgaatctcacatcgctcataagaatacacgc

SEQ ID NO: 2361 - DNA, 40 bp, Homo sapiens
ccagtatacaatccgtttttcagtttagcttgagatcaga

SEQ ID NO: 2362 - DNA, 40 bp, Homo sapiens
ggtacttgaagagaagttgttcgtggtggattcgctttac

SEQ ID NO: 2363 - DNA, 40 bp, Homo sapiens; identical to SEQ ID NO: 2301

SEQ ID NO: 2364 - DNA, 40 bp, Homo sapiens; identical to SEQ ID NO: 2302

SEQ ID NO: 2365 - DNA, 40 bp, Homo sapiens; identical to SEQ ID NO: 2303

SEQ ID NO: 2366 - DNA, 40 bp, Homo sapiens; identical to SEQ ID NO: 2321

SEQ ID NO: 2367 - DNA, 40 bp, Homo sapiens
atcacgcctcctcactcctctcctcccgtcttctcctctc

SEQ ID NO: 2368 - DNA, 40 bp, Homo sapiens; identical to SEQ ID NO: 2324

SEQ ID NO: 2369 - DNA, 40 bp, Homo sapiens
taagagctcttcacccttcaccaccttctccacccagcat

SEQ ID NO: 2370 - DNA, 40 bp, Homo sapiens
cctcagtaacagtctccagtcacggccaccgacgcctggc

SEQ ID NO: 2371 - DNA, 40 bp, Homo sapiens; identical to SEQ ID NO: 2327

SEQ ID NO: 2372 - DNA, 40 bp, Homo sapiens; identical to SEQ ID NO: 2285

SEQ ID NO: 2373 - DNA, 40 bp, Homo sapiens; identical to SEQ ID NO: 2299

SEQ ID NO: 2374 - DNA, 40 bp, Homo sapiens; identical to SEQ ID NO: 2287

SEQ ID NO: 2375 - DNA, 40 bp, Homo sapiens; identical to SEQ ID NO: 2300

SEQ ID NO: 2376 - DNA, 40 bp, Homo sapiens; identical to SEQ ID NO: 2302

SEQ ID NO: 2377 - DNA, 40 bp, Homo sapiens
gttctatataaagtattgcacttgtcccggcctgtggaag

SEQ ID NO: 2378 - DNA, 40 bp, Homo sapiens
tggccgattttggcactagcacatttttgcttgtgtctct

SEQ ID NO: 2379 - DNA, 40 bp, Homo sapiens
attactagcagttaatgattggtttgttagttaatggccc

SEQ ID NO: 2380 - DNA, 40 bp, Homo sapiens
ggaccggctggccccatctggaagactagtgattttgttg

SEQ ID NO: 2381 - DNA, 40 bp, Homo sapiens
gtggctgtgcaaatccatgcaaaactgattgtgataatgt

SEQ ID NO: 2382 - DNA, 40 bp, Homo sapiens
gatcctagtagtgccaaagtgctcatagtgcaggtagttt

SEQ ID NO: 2383 - DNA, 40 bp, Homo sapiens
ttctgctgtgcaaatccatgcaaaactgactgtggtagtg

SEQ ID NO: 2384 - DNA, 40 bp, Homo sapiens
cactctagtgctttatggctttttattcctatgtgatagt

SEQ ID NO: 2385 - DNA, 40 bp, Homo sapiens; identical to SEQ ID NO: 2332

SEQ ID NO: 2386 - DNA, 40 bp, Homo sapiens
acgctgccctgggcattgcacttgtctcggtctgacagtg

SEQ ID NO: 2387 - DNA, 40 bp, Homo sapiens; identical to SEQ ID NO: 2283

SEQ ID NO: 2388 - DNA, 40 bp, Homo sapiens
tgtagttgtgcaaatctatgcaaaactgatggtggcctgc

SEQ ID NO: 2389 - DNA, 40 bp, Homo sapiens
aggtacctgaaaagatggttgaccatagaacatgcgctat

SEQ ID NO: 2390 - DNA, 40 bp, Homo sapiens
ccaaagtgctgttcgtgcaggtagtgtgattacccaacct

SEQ ID NO: 2391 - DNA, 40 bp, Homo sapiens
ccttggccatgtaaaagtgcttacagtgcaggtagctttt

SEQ ID NO: 2392 - DNA, 40 bp, Homo sapiens; identical to SEQ ID NO: 2300

SEQ ID NO: 2393 - DNA, 40 bp, Homo sapiens
taaggtgcatctagtgcagatagtgaagtagattagcatc

SEQ ID NO: 2394 - DNA, 40 bp, Homo sapiens
taaagtgcttatagtgcaggtagtgtttagttatctactg

SEQ ID NO: 2395 - DNA, 40 bp, Homo sapiens
gatggtttagtgaggccctcggatcagcccgctgggtcag

SEQ ID NO: 2396 - DNA, 40 bp, Homo sapiens; identical to SEQ ID NO: 2290

SEQ ID NO: 2397 - DNA, 40 bp, Homo sapiens; identical to SEQ ID NO: 2306

SEQ ID NO: 2398 - DNA, 40 bp, Homo sapiens
tgaggttgcttcagtgaacattcaacgctgtcggtgagtt

SEQ ID NO: 2399 - DNA, 40 bp, Homo sapiens; identical to SEQ ID NO: 2354

SEQ ID NO: 2400 - DNA, 40 bp, Homo sapiens; identical to SEQ ID NO: 2355

SEQ ID NO: 2401 - DNA, 40 bp, Homo sapiens; identical to SEQ ID NO: 2332

SEQ ID NO: 2402 - DNA, 40 bp, Homo sapiens; identical to SEQ ID NO: 2362

SEQ ID NO: 2403 - DNA, 40 bp, Homo sapiens; identical to SEQ ID NO: 2299

SEQ ID NO: 2404 - DNA, 40 bp, Homo sapiens; identical to SEQ ID NO: 2300

SEQ ID NO: 2405 - DNA, 40 bp, Homo sapiens
caattagccaattgtgggtataattagctgcatgtagaat

SEQ ID NO: 2406 - DNA, 40 bp, Homo sapiens; identical to SEQ ID NO: 2290

SEQ ID NO: 2407 - DNA, 40 bp, Homo sapiens
aattaatgaccaaaatgtcagatgtgtccacagctaatta

SEQ ID NO: 2408 - DNA, 40 bp, Homo sapiens
attccctgcatcactctcatgaaatggctgagaaagtgag

SEQ ID NO: 2409 - DNA, 40 bp, Homo sapiens
gagccggtctctttacatctcaaataccaggtatttaggt

SEQ ID NO: 2410 - DNA, 40 bp, Homo sapiens
ccttacgtgggccactggatggctcctccatgtcttggag

SEQ ID NO: 2411 - DNA, 40 bp, Homo sapiens; identical to SEQ ID NO: 2377

SEQ ID NO: 2412 - DNA, 40 bp, Homo sapiens
ctccgctctgagcaatcatgtgcagtgccaatatgggaaa

SEQ ID NO: 2413 - DNA, 40 bp, Homo sapiens
gctgtatatctgaaaggtacagtactgtgataactgaaga

SEQ ID NO: 2414 - DNA, 40 bp, Homo sapiens
agtaccaaagtgctcatagtgcaggtagttttggcatgac

SEQ ID NO: 2415 - DNA, 40 bp, Homo sapiens; identical to SEQ ID NO: 2381

SEQ ID NO: 2416 - DNA, 40 bp, Homo sapiens
ggagatattgcacattactaagttgcatgttgtcacggcc

SEQ ID NO: 2417 - DNA, 40 bp, Homo sapiens
tccctcacttgaactgactgccagagttcacagacagctg

SEQ ID NO: 2418 - DNA, 40 bp, Homo sapiens; identical to SEQ ID NO: 2383

SEQ ID NO: 2419 - DNA, 40 bp, Homo sapiens; identical to SEQ ID NO: 2384

SEQ ID NO: 2420 - DNA, 40 bp, Homo sapiens; identical to SEQ ID NO: 2386

SEQ ID NO: 2421 - DNA, 40 bp, Homo sapiens; identical to SEQ ID NO: 2283

SEQ ID NO: 2422 - DNA, 40 bp, Homo sapiens
ggatttgggagcttatcagaatctccaggggtactttata

SEQ ID NO: 2423 - DNA, 40 bp, Homo sapiens; identical to SEQ ID NO: 2390

SEQ ID NO: 2424 - DNA, 40 bp, Homo sapiens; identical to SEQ ID NO: 2391

SEQ ID NO: 2425 - DNA, 40 bp, Homo sapiens
tgaggtagtaagttgtattgttgtggggtagggatattag

SEQ ID NO: 2426 - DNA, 40 bp, Homo sapiens; identical to SEQ ID NO: 2300

SEQ ID NO: 2427 - DNA, 40 bp, Homo sapiens
gtttctttctcacggtaactggcagcctcgttgtgggctg

SEQ ID NO: 2428 - DNA, 40 bp, Homo sapiens; identical to SEQ ID NO: 2393

SEQ ID NO: 2429 - DNA, 40 bp, Homo sapiens; identical to SEQ ID NO: 2394

SEQ ID NO: 2430 - DNA, 40 bp, Homo sapiens
tgtgacacttcaaactcgtaccgtgagtaataatgcgccg

SEQ ID NO: 2431 - DNA, 40 bp, Homo sapiens
cttggtttttgcaataatgctagcagagtacacacaagaa

SEQ ID NO: 2432 - DNA, 40 bp, Homo sapiens; identical to SEQ ID NO: 2293

SEQ ID NO: 2433 - DNA, 40 bp, Homo sapiens
tgagaatcttgatgatgctgcatcggcaatcaacgactat

SEQ ID NO: 2434 - DNA, 40 bp, Homo sapiens
tgtaattccattgagggtttctggtgactccagcttcgta

SEQ ID NO: 2435 - DNA, 40 bp, Homo sapiens; identical to SEQ ID NO: 2332

SEQ ID NO: 2436 - DNA, 40 bp, Homo sapiens
cattagggacacgtgtgagtgtgccaggctcattcctgag

SEQ ID NO: 2437 - DNA, 40 bp, Homo sapiens; identical to SEQ ID NO: 2405

SEQ ID NO: 2438 - DNA, 40 bp, Homo sapiens; identical to SEQ ID NO: 2410

SEQ ID NO: 2439 - DNA, 40 bp, Homo sapiens
tagttcatggcgtccagcagcagcttctggcagaccgggt

SEQ ID NO: 2440 - DNA, 40 bp, Homo sapiens; identical to SEQ ID NO: 2412

SEQ ID NO: 2441 - DNA, 40 bp, Homo sapiens
cgttacattcaacgggtatttattgagcacccactctgtg

SEQ ID NO: 2442 - DNA, 40 bp, Homo sapiens; identical to SEQ ID NO: 2332

SEQ ID NO: 2443 - DNA, 40 bp, Homo sapiens; identical to SEQ ID NO: 2283

SEQ ID NO: 2444 - DNA, 40 bp, Homo sapiens
ctcagtcgtgccctagcagcgggaacagtactgcagtgag

SEQ ID NO: 2445 - DNA, 40 bp, Homo sapiens
gttcaaaacgtgaggcgctgctataccccctcgtggggaa

SEQ ID NO: 2446 - DNA, 40 bp, Homo sapiens
ggacaagggaggagacacgcagaggtgacagaaaggttag

SEQ ID NO: 2447 - DNA, 40 bp, Homo sapiens
caggctcacacctccctcccccaactctctggaatgtata

SEQ ID NO: 2448 - DNA, 40 bp, Homo sapiens
ctccccatggccctgtctcccaacccttgtaccagtgctg

SEQ ID NO: 2449 - DNA, 40 bp, Homo sapiens
aaggtctttggtcttggaggaaggtgtgctactggaagag

SEQ ID NO: 2450 - DNA, 40 bp, Homo sapiens
ctcagccgtgccctagcagcgggaacagttctgcagtgag

SEQ ID NO: 2451 - DNA, 40 bp, Homo sapiens
tcacagtgaaccggtctctttccctactgtgtcacactcc

SEQ ID NO: 2452 - DNA, 40 bp, Homo sapiens; identical to SEQ ID NO: 2316

SEQ ID NO: 2453 - DNA, 40 bp, Homo sapiens
gtcaggctcagtcccctcccgataaacccctaaataggga

SEQ ID NO: 2454 - DNA, 40 bp, Homo sapiens; identical to SEQ ID NO: 2290

SEQ ID NO: 2455 - DNA, 40 bp, Homo sapiens; identical to SEQ ID NO: 2293

SEQ ID NO: 2456 - DNA, 40 bp, Homo sapiens; identical to SEQ ID NO: 2294

SEQ ID NO: 2457 - DNA, 40 bp, Homo sapiens; identical to SEQ ID NO: 2408

SEQ ID NO: 2458 - DNA, 40 bp, Homo sapiens
tcagggtttatgaagttatcaaagccccttgatggaatta

SEQ ID NO: 2459 - DNA, 40 bp, Homo sapiens
cttggtgtgttctcggtagctatggaaatcccagggtttc

SEQ ID NO: 2460 - DNA, 40 bp, Homo sapiens; identical to SEQ ID NO: 2389

SEQ ID NO: 2461 - DNA, 40 bp, Homo sapiens; identical to SEQ ID NO: 2299

SEQ ID NO: 2462 - DNA, 40 bp, Homo sapiens; identical to SEQ ID NO: 2300

SEQ ID NO: 2463 - DNA, 40 bp, Homo sapiens; identical to SEQ ID NO: 2301

SEQ ID NO: 2464 - DNA, 40 bp, Homo sapiens; identical to SEQ ID NO: 2410

SEQ ID NO: 2465 - DNA, 40 bp, Homo sapiens
ttccaggtgtccaccaaggacgtgccgctggcgctgatgg

SEQ ID NO: 2466 - DNA, 40 bp, Homo sapiens
tgccaagggtttgggggaacattcaacctgtcggtgagtt

SEQ ID NO: 2467 - DNA, 40 bp, Homo sapiens
ttaaagcaggagaggtgagaggaagaattaatgtgtgctc

SEQ ID NO: 2468 - DNA, 40 bp, Homo sapiens
gggattaatgaccagctgggggagttgatagccctcagtg

SEQ ID NO: 2469 - DNA, 40 bp, Homo sapiens; identical to SEQ ID NO: 2306

SEQ ID NO: 2470 - DNA, 40 bp, Homo sapiens; identical to SEQ ID NO: 2295

SEQ ID NO: 2471 - DNA, 40 bp, Homo sapiens; identical to SEQ ID NO: 2448

SEQ ID NO: 2472 - DNA, 40 bp, Homo sapiens
cagttgcatagtcacaaaagtgatcattggcaggtgtggc

SEQ ID NO: 2473 - DNA, 40 bp, Homo sapiens; identical to SEQ ID NO: 2451

SEQ ID NO: 2474 - DNA, 40 bp, Homo sapiens
ctgtgggatctggttctgtagctgagagcacatcgctaaa

SEQ ID NO: 2475 - DNA, 40 bp, Homo sapiens
tctagcagcacagaaatattggcacagggaagcgagtctg

SEQ ID NO: 2476 - DNA, 40 bp, Homo sapiens; identical to SEQ ID NO: 2299

SEQ ID NO: 2477 - DNA, 40 bp, Homo sapiens
ttacacagctcacgagtgcctgctggggtggaacctggtc

SEQ ID NO: 2478 - DNA, 40 bp, Homo sapiens; identical to SEQ ID NO: 2300

SEQ ID NO: 2479 - DNA, 40 bp, Homo sapiens; identical to SEQ ID NO: 2301

SEQ ID NO: 2480 - DNA, 40 bp, Homo sapiens; identical to SEQ ID NO: 2453

SEQ ID NO: 2481 - DNA, 40 bp, Homo sapiens; identical to SEQ ID NO: 2377

SEQ ID NO: 2482 - DNA, 40 bp, Homo sapiens; identical to SEQ ID NO: 2412

SEQ ID NO: 2483 - DNA, 40 bp, Homo sapiens
gacgggacattattacttttggtacgcgctgtgacacttc

SEQ ID NO: 2484 - DNA, 40 bp, Homo sapiens
gttctgttgctaagacaacaggatgctagcaggcatatgc

SEQ ID NO: 2485 - DNA, 40 bp, Homo sapiens
tctcaggctgtgaccctctagagggaagcgctttctgttg

SEQ ID NO: 2486 - DNA, 40 bp, Homo sapiens
tgaattattgcacaataaattcatgccctgttgtgtctta

SEQ ID NO: 2487 - DNA, 40 bp, Homo sapiens
gagcattaagatttcctattctttgaggcaaatattgacc

SEQ ID NO: 2488 - DNA, 40 bp, Homo sapiens
gtgaaagaaagtgcttcctttcagagggttactctttgag

SEQ ID NO: 2489 - DNA, 40 bp, Homo sapiens; identical to SEQ ID NO: 2379

SEQ ID NO: 2490 - DNA, 40 bp, Homo sapiens
cctgaaaggtctggtgttaagcaaatactcggtgaccaga

SEQ ID NO: 2491 - DNA, 40 bp, Homo sapiens
gttcacagtgggagaaatatgcttcgtattactctttctc

SEQ ID NO: 2492 - DNA, 40 bp, Homo sapiens
cagctatgtggactctagctgccaaaggcgcttctccttc

SEQ ID NO: 2493 - DNA, 40 bp, Homo sapiens; identical to SEQ ID NO: 2290

SEQ ID NO: 2494 - DNA, 40 bp, Homo sapiens; identical to SEQ ID NO: 2391

SEQ ID NO: 2495 - DNA, 40 bp, Homo sapiens; identical to SEQ ID NO: 2414

SEQ ID NO: 2496 - DNA, 40 bp, Homo sapiens
aacttggctacaaggctctttccctctctatgaaggacag

SEQ ID NO: 2497 - DNA, 40 bp, Homo sapiens
agttggggagaactttatgattattctcatgcatcatctt

SEQ ID NO: 2498 - DNA, 40 bp, Homo sapiens
gagtgtggatctaatcttcagctgattaaatgtccctcat

SEQ ID NO: 2499 - DNA, 40 bp, Homo sapiens; identical to SEQ ID NO: 2381

SEQ ID NO: 2500 - DNA, 40 bp, Homo sapiens
agcaaaagctattatttgcccttgatgagccaatcagatg

SEQ ID NO: 2501 - DNA, 40 bp, Homo sapiens
gcgctgacaaatcttgcctgattctgtatgatccatgaga

SEQ ID NO: 2502 - DNA, 40 bp, Homo sapiens
taatgagaattatgtttgcacattgaggcaggataaatcc

SEQ ID NO: 2503 - DNA, 40 bp, Homo sapiens
gacaaacatgcaggaaaaattatcccctggggattctaca

SEQ ID NO: 2504 - DNA, 40 bp, Homo sapiens
ttgtgggtcagctgcccagctatcggctggattagtgaat

SEQ ID NO: 2505 - DNA, 40 bp, Homo sapiens; identical to SEQ ID NO: 2407

SEQ ID NO: 2506 - DNA, 40 bp, Homo sapiens
actggaattatgttttatcttaagtccacactggatcctc

SEQ ID NO: 2507 - DNA, 40 bp, Homo sapiens
taaagtgagttatggaggttactctcctgtgagaggaaat

SEQ ID NO: 2508 - DNA, 40 bp, Homo sapiens
tacacctaaggcatgtactgtattaatgaaccaataaaac

SEQ ID NO: 2509 - DNA, 40 bp, Homo sapiens
catgatggggtggggtgagatggggagcgaagactattac

SEQ ID NO: 2510 - DNA, 40 bp, Homo sapiens
gcccgggcatgcattttatctagcaccatgtgtttcagct

SEQ ID NO: 2511 - DNA, 40 bp, Homo sapiens; identical to SEQ ID NO: 2486

SEQ ID NO: 2512 - DNA, 40 bp, Homo sapiens
gtttaaacagccagtgcaaacatttagatctgagtcaaaa

SEQ ID NO: 2513 - DNA, 40 bp, Homo sapiens; identical to SEQ ID NO: 2382

SEQ ID NO: 2514 - DNA, 40 bp, Homo sapiens
cagggattgtgggttcgagtcccacccggggtaaagaaag

SEQ ID NO: 2515 - DNA, 40 bp, Homo sapiens
gaactgtttgctttggatgggcttggtcctcattggctga

SEQ ID NO: 2516 - DNA, 40 bp, Homo sapiens
aaataatgactggccataagatcaagacaagtgtccaaag

SEQ ID NO: 2517 - DNA, 40 bp, Homo sapiens
caggtacatgttgatcagcaggggctgggaggcgccgctc

SEQ ID NO: 2518 - DNA, 41 bp, Homo sapiens
ctcacggcgttgccatggagacaactccggggctggggctc

SEQ ID NO: 2519 - DNA, 40 bp, Homo sapiens
tccgtcacttgaactggctgccagcgttcacagacagctg

SEQ ID NO: 2520 - DNA, 40 bp, Homo sapiens
gtacatctggatgtagttgtgctgcagctgcttctggtag

SEQ ID NO: 2521 - DNA, 40 bp, Homo sapiens
cggcaaaaacctctgtcagaacaaaattaggtgatctatc

SEQ ID NO: 2522 - DNA, 40 bp, Homo sapiens; identical to SEQ ID NO: 2383

SEQ ID NO: 2523 - DNA, 40 bp, Homo sapiens
cacaaaaaggcataagcagacatcttgccctttggtttct

SEQ ID NO: 2524 - DNA, 40 bp, Homo sapiens
aggagatatgccaagatatattcacagctttatatacaca

SEQ ID NO: 2525 - DNA, 40 bp, Homo sapiens
gctgctctgctgaggggctggactctgtccagaagcacca

SEQ ID NO: 2526 - DNA, 40 bp, Homo sapiens
cattctctacaagcatatggccttgggacattaagatggc

SEQ ID NO: 2527 - DNA, 40 bp, Homo sapiens
aacatcaagatctattgacctgagaggtaaatattgaccg

SEQ ID NO: 2528 - DNA, 40 bp, Homo sapiens
aaatgttgttatagtatcccacctaccctgatgtatcttt

SEQ ID NO: 2529 - DNA, 40 bp, Homo sapiens
gaacaggcttcaaggttcttggcaggaatattccgtgtag

SEQ ID NO: 2530 - DNA, 40 bp, Homo sapiens
atgccttgtgctctgtgctaattcagaagaataagcctgt

SEQ ID NO: 2531 - DNA, 40 bp, Homo sapiens
cttgtcgactagccagttatgaacagaggaggatgttctc

SEQ ID NO: 2532 - DNA, 40 bp, Homo sapiens
ggagatcccttcaaggtacttagttttaaatgagtgctct

SEQ ID NO: 2533 - DNA, 40 bp, Homo sapiens; identical to SEQ ID NO: 2386

SEQ ID NO: 2534 - DNA, 40 bp, Homo sapiens
ttgtgcactgcacaaccctagtggcgccattcaattatag

SEQ ID NO: 2535 - DNA, 40 bp, Homo sapiens
ctctctttttcctgcttgatttgcctaatggaagctgaca

SEQ ID NO: 2536 - DNA, 40 bp, Homo sapiens; identical to SEQ ID NO: 2298

SEQ ID NO: 2537 - DNA, 40 bp, Homo sapiens
agcacatcccatgatcacagtaatgttctttggagatgta

SEQ ID NO: 2538 - DNA, 40 bp, Homo sapiens; identical to SEQ ID NO: 2409

SEQ ID NO: 2539 - DNA, 40 bp, Homo sapiens; identical to SEQ ID NO: 2388

SEQ ID NO: 2540 - DNA, 40 bp, Homo sapiens
accaacctggaggactccatgctgttgagctgttcacaag

SEQ ID NO: 2541 - DNA, 40 bp, Homo sapiens; identical to SEQ ID NO: 2389

SEQ ID NO: 2542 - DNA, 40 bp, Homo sapiens; identical to SEQ ID NO: 2390

SEQ ID NO: 2543 - DNA, 40 bp, Homo sapiens; identical to SEQ ID NO: 2391

SEQ ID NO: 2544 - DNA, 40 bp, Homo sapiens
gcattagggagaatagttgatggattacaaatctctgcat

SEQ ID NO: 2545 - DNA, 40 bp, Homo sapiens; identical to SEQ ID NO: 2300

SEQ ID NO: 2546 - DNA, 40 bp, Homo sapiens; identical to SEQ ID NO: 2427

SEQ ID NO: 2547 - DNA, 40 bp, Homo sapiens
taagctatggaatgtaaagaagtatgtatctcaggccggg

SEQ ID NO: 2548 - DNA, 40 bp, Homo sapiens; identical to SEQ ID NO: 2393

SEQ ID NO: 2549 - DNA, 40 bp, Homo sapiens; identical to SEQ ID NO: 2394

SEQ ID NO: 2550 - DNA, 40 bp, Homo sapiens
tgctgctgttaatgccattaggatgactatttatatcacc

SEQ ID NO: 2551 - DNA, 40 bp, Homo sapiens
cataagtcattcctagaaattgttcataatgcctgtaaca

SEQ ID NO: 2552 - DNA, 40 bp, Homo sapiens; identical to SEQ ID NO: 2410

SEQ ID NO: 2553 - DNA, 40 bp, Homo sapiens
aatcatagaggaaaatccacgttttcagtatcaaatgctg

SEQ ID NO: 2554 - DNA, 40 bp, Homo sapiens; identical to SEQ ID NO: 2293

SEQ ID NO: 2555 - DNA, 40 bp, Homo sapiens; identical to SEQ ID NO: 2355

SEQ ID NO: 2556 - DNA, 40 bp, Homo sapiens; identical to SEQ ID NO: 2358

SEQ ID NO: 2557 - DNA, 40 bp, Homo sapiens
cacgaagaagttcagcaaccaggagaccaggtgggggccg

SEQ ID NO: 2558 - DNA, 40 bp, Homo sapiens
tcgccccagtgttcagactacctgttcaggacaatgccgt

SEQ ID NO: 2559 - DNA, 40 bp, Homo sapiens; identical to SEQ ID NO: 2362

SEQ ID NO: 2560 - DNA, 40 bp, Homo sapiens
aattgagcaaacagtgcaattttctgtaattatgccagtg

SEQ ID NO: 2561 - DNA, 40 bp, Homo sapiens
cctcacggtccagttttcccaggaatcccttagatgctaa

SEQ ID NO: 2562 - DNA, 40 bp, Homo sapiens
gccaacccagtgttcagactacctgttcaggaggctctca

SEQ ID NO: 2563 - DNA, 40 bp, Homo sapiens; identical to SEQ ID NO: 2377

SEQ ID NO: 2564 - DNA, 40 bp, Homo sapiens; identical to SEQ ID NO: 2413

SEQ ID NO: 2565 - DNA, 40 bp, Homo sapiens
ccctggctgggatatcatcatatactgtaagtttgcgatg

SEQ ID NO: 2566 - DNA, 40 bp, Homo sapiens
tcaggctgtgacactctagagggaagcgctttctgttgtc

SEQ ID NO: 2567 - DNA, 40 bp, Homo sapiens
gaaaagaaagtgcatccttttagaggtttactgtttgagg

SEQ ID NO: 2568 - DNA, 40 bp, Homo sapiens
tgctacagtcaagatgcgaatcattatttgctgctctaga

SEQ ID NO: 2569 - DNA, 40 bp, Homo sapiens; identical to SEQ ID NO: 2391

SEQ ID NO: 2570 - DNA, 40 bp, Homo sapiens
gtcagcagtgccttagcagcacgtaaatattggcgttaag

SEQ ID NO: 2571 - DNA, 40 bp, Homo sapiens
gaggtcacaatcaacattcattgttgtcggtgggttgtga

SEQ ID NO: 2572 - DNA, 40 bp, Homo sapiens
gtcagaataatgtcaaagtgcttacagtgcaggtagtgat

SEQ ID NO: 2573 - DNA, 40 bp, Homo sapiens; identical to SEQ ID NO: 2381

SEQ ID NO: 2574 - DNA, 40 bp, Homo sapiens
tgccaattccataggtcacaggtatgttcgcctcaatgcc

SEQ ID NO: 2575 - DNA, 40 bp, Homo sapiens; identical to SEQ ID NO: 2306

SEQ ID NO: 2576 - DNA, 40 bp, Homo sapiens
catttctttaggccaatattctgtatgactgtgctacttc

SEQ ID NO: 2577 - DNA, 40 bp, Homo sapiens
ggcatggagttcaagcagcattgtacagggctatcaaagc

SEQ ID NO: 2578 - DNA, 40 bp, Homo sapiens
gtctctaatactgcctggtaatgatgacggcggagccctg

SEQ ID NO: 2579 - DNA, 40 bp, Homo sapiens
tatggatcaagcagcattgtacagggctatgaaggcattg

SEQ ID NO: 2580 - DNA, 40 bp, Homo sapiens; identical to SEQ ID NO: 2566

SEQ ID NO: 2581 - DNA, 40 bp, Homo sapiens; identical to SEQ ID NO: 2382

SEQ ID NO: 2582 - DNA, 40 bp, Homo sapiens; identical to SEQ ID NO: 2383

SEQ ID NO: 2583 - DNA, 40 bp, Homo sapiens; identical to SEQ ID NO: 2577

SEQ ID NO: 2584 - DNA, 40 bp, Homo sapiens; identical to SEQ ID NO: 2384

SEQ ID NO: 2585 - DNA, 40 bp, Homo sapiens
gtagcattcaggtcaagcaacattgtacagggctatgaaa

SEQ ID NO: 2586 - DNA, 40 bp, Homo sapiens
tctcaggctgtgtccctctacagggaagcgctttctgttg

SEQ ID NO: 2587 - DNA, 40 bp, Homo sapiens; identical to SEQ ID NO: 2386

SEQ ID NO: 2588 - DNA, 40 bp, Homo sapiens
gttccactctagcagcacgtaaatattggcgtagtgaaat

SEQ ID NO: 2589 - DNA, 40 bp, Homo sapiens
ttgttggacactctttccctgttgcactactgtgggcctc

SEQ ID NO: 2590 - DNA, 40 bp, Homo sapiens; identical to SEQ ID NO: 2588

SEQ ID NO: 2591 - DNA, 40 bp, Homo sapiens
tgatataaatagtcatcctaatggcattaacagcagcact

SEQ ID NO: 2592 - DNA, 40 bp, Homo sapiens; identical to SEQ ID NO: 2475

SEQ ID NO: 2593 - DNA, 40 bp, Homo sapiens; identical to SEQ ID NO: 2390

SEQ ID NO: 2594 - DNA, 40 bp, Homo sapiens; identical to SEQ ID NO: 2391

SEQ ID NO: 2595 - DNA, 40 bp, Homo sapiens; identical to SEQ ID NO: 2300

SEQ ID NO: 2596 - DNA, 40 bp, Homo sapiens
tctcagcctgtgaccctctagagggaagcgctttctgttg

SEQ ID NO: 2597 - DNA, 40 bp, Homo sapiens; identical to SEQ ID NO: 2578

SEQ ID NO: 2598 - DNA, 40 bp, Homo sapiens
caatgtcagcagtgccttagcagcacgtaaatattggcgt

SEQ ID NO: 2599 - DNA, 40 bp, Homo sapiens; identical to SEQ ID NO: 2393

SEQ ID NO: 2600 - DNA, 40 bp, Homo sapiens; identical to SEQ ID NO: 2394

SEQ ID NO: 2601 - DNA, 40 bp, Homo sapiens; identical to SEQ ID NO: 2377

SEQ ID NO: 2602 - DNA, 40 bp, Homo sapiens; identical to SEQ ID NO: 2430

SEQ ID NO: 2603 - DNA, 40 bp, Homo sapiens; identical to SEQ ID NO: 2391

SEQ ID NO: 2604 - DNA, 40 bp, Homo sapiens; identical to SEQ ID NO: 2414

SEQ ID NO: 2605 - DNA, 40 bp, Homo sapiens; identical to SEQ ID NO: 2572

SEQ ID NO: 2606 - DNA, 40 bp, Homo sapiens; identical to SEQ ID NO: 2381

SEQ ID NO: 2607 - DNA, 40 bp, Homo sapiens
gtggtgcattgtagttgcattgcatgttctggtggtaccc

SEQ ID NO: 2608 - DNA, 40 bp, Homo sapiens
tctgtatggtattgcacttgtcccggcctgttgagtttgg

SEQ ID NO: 2609 - DNA, 40 bp, Homo sapiens
ccttagcagagctgtggagtgtgacaatggtgtttgtgtc

SEQ ID NO: 2610 - DNA, 40 bp, Homo sapiens; identical to SEQ ID NO: 2447

SEQ ID NO: 2611 - DNA, 40 bp, Homo sapiens; identical to SEQ ID NO: 2382

SEQ ID NO: 2612 - DNA, 40 bp, Homo sapiens; identical to SEQ ID NO: 2383

SEQ ID NO: 2613 - DNA, 40 bp, Homo sapiens; identical to SEQ ID NO: 2384

SEQ ID NO: 2614 - DNA, 40 bp, Homo sapiens; identical to SEQ ID NO: 2451

SEQ ID NO: 2615 - DNA, 40 bp, Homo sapiens; identical to SEQ ID NO: 2386

SEQ ID NO: 2616 - DNA, 40 bp, Homo sapiens
tacctcagaagcctcactcaaccctctcccgctgagtctc

SEQ ID NO: 2617 - DNA, 40 bp, Homo sapiens; identical to SEQ ID NO: 2390

SEQ ID NO: 2618 - DNA, 40 bp, Homo sapiens; identical to SEQ ID NO: 2391

SEQ ID NO: 2619 - DNA, 40 bp, Homo sapiens; identical to SEQ ID NO: 2300

SEQ ID NO: 2620 - DNA, 40 bp, Homo sapiens; identical to SEQ ID NO: 2427

SEQ ID NO: 2621 - DNA, 40 bp, Homo sapiens; identical to SEQ ID NO: 2301

SEQ ID NO: 2622 - DNA, 40 bp, Homo sapiens; identical to SEQ ID NO: 2393

SEQ ID NO: 2623 - DNA, 40 bp, Homo sapiens; identical to SEQ ID NO: 2394

SEQ ID NO: 2624 - DNA, 40 bp, Homo sapiens; identical to SEQ ID NO: 2378

SEQ ID NO: 2625 - DNA, 40 bp, Homo sapiens
ctaatactgtctggtaaaaccgtccatccgctgcctgatc

SEQ ID NO: 2626 - DNA, 40 bp, Homo sapiens
aggctttgtgcgcgcattaaagctcgccggacccccgacc

SEQ ID NO: 2627 - DNA, 40 bp, Homo sapiens; identical to SEQ ID NO: 2500

SEQ ID NO: 2628 - DNA, 40 bp, Homo sapiens
gtcctgtctaaaggaagaagtttgttctactgtaaacagt

SEQ ID NO: 2629 - DNA, 40 bp, Homo sapiens; identical to SEQ ID NO: 2517

SEQ ID NO: 2630 - DNA, 40 bp, Homo sapiens; identical to SEQ ID NO: 2520

SEQ ID NO: 2631 - DNA, 40 bp, Homo sapiens
tggttcccgccccctgtaacagcaactccatgtggaagtg

SEQ ID NO: 2632 - DNA, 40 bp, Homo sapiens; identical to SEQ ID NO: 2524

SEQ ID NO: 2633 - DNA, 40 bp, Homo sapiens; identical to SEQ ID NO: 2528

SEQ ID NO: 2634 - DNA, 40 bp, Homo sapiens; identical to SEQ ID NO: 2386

SEQ ID NO: 2635 - DNA, 40 bp, Homo sapiens
ggacaattcaacagtggtgagtcacttcgccacttttcag

SEQ ID NO: 2636 - DNA, 40 bp, Homo sapiens; identical to SEQ ID NO: 2283

SEQ ID NO: 2637 - DNA, 40 bp, Homo sapiens; identical to SEQ ID NO: 2390

SEQ ID NO: 2638 - DNA, 40 bp, Homo sapiens; identical to SEQ ID NO: 2391

SEQ ID NO: 2639 - DNA, 40 bp, Homo sapiens; identical to SEQ ID NO: 2287

SEQ ID NO: 2640 - DNA, 40 bp, Homo sapiens; identical to SEQ ID NO: 2394

SEQ ID NO: 2641 - DNA, 40 bp, Homo sapiens; identical to SEQ ID NO: 2410

SEQ ID NO: 2642 - DNA, 40 bp, Homo sapiens
tgagccctcggaggactccatttgttttgatgatggattc

SEQ ID NO: 2643 - DNA, 40 bp, Homo sapiens
gcccaacagaacaacttgtttctccagagcctgaggttta

SEQ ID NO: 2644 - DNA, 40 bp, Homo sapiens
tcttctgacaatgaaggtaggcggacaacgaggagattgc

SEQ ID NO: 2645 - DNA, 40 bp, Homo sapiens
gaagacggacttggttccgtttgaccagccagagcagggg

SEQ ID NO: 2646 - DNA, 40 bp, Homo sapiens
gtccggcgcgagtggagctgttgtaaaatggcggccgaag

SEQ ID NO: 2647 - DNA, 40 bp, Homo sapiens; identical to SEQ ID NO: 2344

SEQ ID NO: 2648 - DNA, 40 bp, Homo sapiens; identical to SEQ ID NO: 2347

SEQ ID NO: 2649 - DNA, 40 bp, Homo sapiens
attgtccaaacgcaattctcgagtctatggctccggccga

SEQ ID NO: 2650 - DNA, 40 bp, Homo sapiens
ccgcccgccgttcctttttcctatgcatatacttctttga

SEQ ID NO: 2651 - DNA, 40 bp, Homo sapiens
caccgccggccgatgggcgtcttaccagacatggttagac

SEQ ID NO: 2652 - DNA, 40 bp, Homo sapiens; identical to SEQ ID NO: 2626

SEQ ID NO: 2653 - DNA, 40 bp, Homo sapiens
tgtcctgacccagctaaagctgccagttgaagaactgttg

SEQ ID NO: 2654 - DNA, 40 bp, Homo sapiens
cttaccctggtgcgtggggccgcagggctaacaccaaaaa

SEQ ID NO: 2655 - DNA, 40 bp, Homo sapiens
tcattggtccagaggggagataggttcctgtgatttttcc

SEQ ID NO: 2656 - DNA, 40 bp, Homo sapiens
gtctgcacattggttaggctgggctgggttagaccctcgg

SEQ ID NO: 2657 - DNA, 40 bp, Homo sapiens; identical to SEQ ID NO: 2324

SEQ ID NO: 2658 - DNA, 40 bp, Homo sapiens
ttaaggcacgcggtgaatgccaagagcggagcctacggct

SEQ ID NO: 2659 - DNA, 40 bp, Homo sapiens
agctggtgttgtgaatcaggccgacgagcagcgcatcctc

SEQ ID NO: 2660 - DNA, 40 bp, Homo sapiens
ctcagtctgcgggccccgaggagggttgtgggcccttttt

SEQ ID NO: 2661 - DNA, 40 bp, Homo sapiens
cgagaggcactttgtacttctgccaggagaccatatgata

SEQ ID NO: 2662 - DNA, 40 bp, Homo sapiens
ttacccagccgggccgccaacaccagatccttctccttct

SEQ ID NO: 2663 - DNA, 40 bp, Homo sapiens
ccgctttgttcacagtggctaagttctgcacctgaagaga

SEQ ID NO: 2664 - DNA, 40 bp, Homo sapiens
gtatatgtgtgtgtgtgtgtgtgtgtgtgtgtgtgtgtgt

SEQ ID NO: 2665 - DNA, 40 bp, Homo sapiens; identical to SEQ ID NO: 2631

SEQ ID NO: 2666 - DNA, 40 bp, Homo sapiens; identical to SEQ ID NO: 2369

SEQ ID NO: 2667 - DNA, 40 bp, Homo sapiens; identical to SEQ ID NO: 2326

SEQ ID NO: 2668 - DNA, 40 bp, Homo sapiens; identical to SEQ ID NO: 2327

SEQ ID NO: 2669 - DNA, 40 bp, Homo sapiens; identical to SEQ ID NO: 2310

SEQ ID NO: 2670 - DNA, 40 bp, Homo sapiens
gtctgtcttctgtatataccctgtagatccgaatttgtgt

SEQ ID NO: 2671 - DNA, 40 bp, Homo sapiens
aatcacattgccagggattaccacgcaaccacgaccttgg

SEQ ID NO: 2672 - DNA, 40 bp, Homo sapiens
ctgtggtctcagaatcggggttttgagggcgagatgagtt

SEQ ID NO: 2673 - DNA, 40 bp, Homo sapiens; identical to SEQ ID NO: 2285

SEQ ID NO: 2674 - DNA, 40 bp, Homo sapiens
atctcagtagccaatatttttctctgctggtatcaaatga

SEQ ID NO: 2675 - DNA, 40 bp, Homo sapiens; identical to SEQ ID NO: 2558

SEQ ID NO: 2676 - DNA, 40 bp, Homo sapiens
tgtacagcaggcacagacaggcagtcacatgacaacccag

SEQ ID NO: 2677 - DNA, 40 bp, Homo sapiens
cttgtgttttcacagcagccacaggccctacatccttcct

SEQ ID NO: 2678 - DNA, 40 bp, Homo sapiens
agaaggcgctccctgctagcccggctctgttctaattata

SEQ ID NO: 2679 - DNA, 40 bp, Homo sapiens; identical to SEQ ID NO: 2561

SEQ ID NO: 2680 - DNA, 40 bp, Homo sapiens
tcctgtcacaaatcacattgccagggatttccaaccgacc

SEQ ID NO: 2681 - DNA, 40 bp, Homo sapiens
agttggtttgtgtacactggctcagttcagcaggaacagg

SEQ ID NO: 2682 - DNA, 40 bp, Homo sapiens; identical to SEQ ID NO: 2562

SEQ ID NO: 2683 - DNA, 40 bp, Homo sapiens; identical to SEQ ID NO: 2412

SEQ ID NO: 2684 - DNA, 40 bp, Homo sapiens
ggttaagactctaacaaacgagttgtgaattgtagcaatg

SEQ ID NO: 2685 - DNA, 40 bp, Homo sapiens; identical to SEQ ID NO: 2414

SEQ ID NO: 2686 - DNA, 40 bp, Homo sapiens
gggatactcaaaatgggggcgctttcctttttgtctgtac

SEQ ID NO: 2687 - DNA, 40 bp, Homo sapiens; identical to SEQ ID NO: 2325

SEQ ID NO: 2688 - DNA, 40 bp, Homo sapiens; identical to SEQ ID NO: 2383

SEQ ID NO: 2689 - DNA, 40 bp, Homo sapiens; identical to SEQ ID NO: 2327

SEQ ID NO: 2690 - DNA, 40 bp, Homo sapiens
actttctgctctctggtgaaagtgccgccatcttttgagt

SEQ ID NO: 2691 - DNA, 40 bp, Homo sapiens; identical to SEQ ID NO: 2386

SEQ ID NO: 2692 - DNA, 40 bp, Homo sapiens
agcagcttagaatctactgccctaaatgccccttctggca

SEQ ID NO: 2693 - DNA, 40 bp, Homo sapiens; identical to SEQ ID NO: 2390

SEQ ID NO: 2694 - DNA, 40 bp, Homo sapiens; identical to SEQ ID NO: 2391

SEQ ID NO: 2695 - DNA, 40 bp, Homo sapiens; identical to SEQ ID NO: 2300

SEQ ID NO: 2696 - DNA, 40 bp, Homo sapiens; identical to SEQ ID NO: 2394

SEQ ID NO: 2697 - DNA, 40 bp, Homo sapiens; identical to SEQ ID NO: 2290

SEQ ID NO: 2698 - DNA, 40 bp, Homo sapiens; identical to SEQ ID NO: 2367

SEQ ID NO: 2699 - DNA, 40 bp, Homo sapiens
caaaggtcacaattaacattcattgttgtcggtgggttgt

SEQ ID NO: 2700 - DNA, 40 bp, Homo sapiens; identical to SEQ ID NO: 2609

SEQ ID NO: 2701 - DNA, 40 bp, Homo sapiens; identical to SEQ ID NO: 2433

SEQ ID NO: 2702 - DNA, 40 bp, Homo sapiens; identical to SEQ ID NO: 2451

SEQ ID NO: 2703 - DNA, 40 bp, Homo sapiens
tgggaaccttgttaaaatgcagattctgattctcaggtct

SEQ ID NO: 2704 - DNA, 40 bp, Homo sapiens; identical to SEQ ID NO: 2391

SEQ ID NO: 2705 - DNA, 40 bp, Homo sapiens; identical to SEQ ID NO: 2299

SEQ ID NO: 2706 - DNA, 40 bp, Homo sapiens; identical to SEQ ID NO: 2300

SEQ ID NO: 2707 - DNA, 40 bp, Homo sapiens; identical to SEQ ID NO: 2427

SEQ ID NO: 2708 - DNA, 40 bp, Homo sapiens; identical to SEQ ID NO: 2301

SEQ ID NO: 2709 - DNA, 40 bp, Homo sapiens; identical to SEQ ID NO: 2302

SEQ ID NO: 2710 - DNA, 40 bp, Homo sapiens; identical to SEQ ID NO: 2394

SEQ ID NO: 2711 - DNA, 40 bp, Homo sapiens
ttaaggcacgcggtgaatgccaagagaggcgcctccgccg

SEQ ID NO: 2712 - DNA, 40 bp, Homo sapiens
tcagaggactccaaggaacattcaacgctgtcggtgagtt

SEQ ID NO: 2713 - DNA, 40 bp, Homo sapiens
cttcctccctgggcatctctagcacaggggatccccaaac

SEQ ID NO: 2714 - DNA, 40 bp, Homo sapiens
ctatgacagaaggtactctgtgggagggaggagataatag

SEQ ID NO: 2715 - DNA, 40 bp, Homo sapiens
ggtgggattacccggctgccgctgtcgcctggatggtctc

SEQ ID NO: 2716 - DNA, 40 bp, Homo sapiens; identical to SEQ ID NO: 2290

SEQ ID NO: 2717 - DNA, 40 bp, Homo sapiens; identical to SEQ ID NO: 2305

SEQ ID NO: 2718 - DNA, 40 bp, Homo sapiens
ctgatggctgcactcaacattcattgctgtcggtgggttt

SEQ ID NO: 2719 - DNA, 40 bp, Homo sapiens
ttatcataaaataatcacagccctcaggtgctgtgaggca

SEQ ID NO: 2720 - DNA, 40 bp, Homo sapiens; identical to SEQ ID NO: 2414

SEQ ID NO: 2721 - DNA, 40 bp, Homo sapiens; identical to SEQ ID NO: 2571

SEQ ID NO: 2722 - DNA, 40 bp, Homo sapiens; identical to SEQ ID NO: 2306

SEQ ID NO: 2723 - DNA, 40 bp, Homo sapiens; identical to SEQ ID NO: 2407

SEQ ID NO: 2724 - DNA, 40 bp, Homo sapiens; identical to SEQ ID NO: 2294

SEQ ID NO: 2725 - DNA, 40 bp, Homo sapiens; identical to SEQ ID NO: 2398

SEQ ID NO: 2726 - DNA, 40 bp, Homo sapiens; identical to SEQ ID NO: 2447

SEQ ID NO: 2727 - DNA, 40 bp, Homo sapiens; identical to SEQ ID NO: 2325

SEQ ID NO: 2728 - DNA, 40 bp, Homo sapiens
caatcggttagcgcgttcggctgttaaccgaaaggttggt

SEQ ID NO: 2729 - DNA, 40 bp, Homo sapiens
tttaaaaggtcacaatcaacattcattgctgtcggtgggt

SEQ ID NO: 2730 - DNA, 40 bp, Homo sapiens; identical to SEQ ID NO: 2296

SEQ ID NO: 2731 - DNA, 40 bp, Homo sapiens
tctgttgaatataaattggaattgcactttagcaatggtg

SEQ ID NO: 2732 - DNA, 40 bp, Homo sapiens; identical to SEQ ID NO: 2451

SEQ ID NO: 2733 - DNA, 40 bp, Homo sapiens; identical to SEQ ID NO: 2360

SEQ ID NO: 2734 - DNA, 40 bp, Homo sapiens; identical to SEQ ID NO: 2386

SEQ ID NO: 2735 - DNA, 40 bp, Homo sapiens
ctgggattatgctaaacagagcaatttcctagccctcacg

SEQ ID NO: 2736 - DNA, 40 bp, Homo sapiens; identical to SEQ ID NO: 2317

SEQ ID NO: 2737 - DNA, 40 bp, Homo sapiens; identical to SEQ ID NO: 2390

SEQ ID NO: 2738 - DNA, 40 bp, Homo sapiens; identical to SEQ ID NO: 2391

SEQ ID NO: 2739 - DNA, 40 bp, Homo sapiens; identical to SEQ ID NO: 2299

SEQ ID NO: 2740 - DNA, 40 bp, Homo sapiens; identical to SEQ ID NO: 2300

SEQ ID NO: 2741 - DNA, 40 bp, Homo sapiens; identical to SEQ ID NO: 2341

SEQ ID NO: 2742 - DNA, 40 bp, Homo sapiens; identical to SEQ ID NO: 2342

SEQ ID NO: 2743 - DNA, 40 bp, Homo sapiens; identical to SEQ ID NO: 2301

SEQ ID NO: 2744 - DNA, 40 bp, Homo sapiens; identical to SEQ ID NO: 2302

SEQ ID NO: 2745 - DNA, 40 bp, Homo sapiens; identical to SEQ ID NO: 2394

SEQ ID NO: 2746 - DNA, 40 bp, Homo sapiens; identical to SEQ ID NO: 2344

SEQ ID NO: 2747 - DNA, 40 bp, Homo sapiens; identical to SEQ ID NO: 2369

SEQ ID NO: 2748 - DNA, 40 bp, Homo sapiens; identical to SEQ ID NO: 2327

SEQ ID NO: 2749 - DNA, 40 bp, Homo sapiens; identical to SEQ ID NO: 2448

SEQ ID NO: 2750 - DNA, 40 bp, Homo sapiens
gagtgtttctttggcagtgtcttagctggttgttgtgagc

SEQ ID NO: 2751 - DNA, 40 bp, Homo sapiens
ctagctccgttcgtgatccgggagcctggtgccagcgaga

SEQ ID NO: 2752 - DNA, 40 bp, Homo sapiens
gaagatcggttgtcatctggtctggtcagcccggccccga

SEQ ID NO: 2753 - DNA, 40 bp, Homo sapiens
tgttaagtggaaaagcctccaggaacgtggcagaaaaagg

SEQ ID NO: 2754 - DNA, 40 bp, Homo sapiens
gcaacggcctgattcacaacaccagctgccccaccacacc

SEQ ID NO: 2755 - DNA, 40 bp, Homo sapiens; identical to SEQ ID NO: 2347

SEQ ID NO: 2756 - DNA, 40 bp, Homo sapiens; identical to SEQ ID NO: 2651

SEQ ID NO: 2757 - DNA, 40 bp, Homo sapiens
gacctgattcccatctttgtatttggcgaccacccgactg

SEQ ID NO: 2758 - DNA, 40 bp, Homo sapiens; identical to SEQ ID NO: 2626

SEQ ID NO: 2759 - DNA, 40 bp, Homo sapiens; identical to SEQ ID NO: 2333

SEQ ID NO: 2760 - DNA, 40 bp, Homo sapiens
tctgtatttaatttggctcagccgggaagatttttggctc

SEQ ID NO: 2761 - DNA, 40 bp, Homo sapiens
ttgcagagcctaagacacaggcccagagaggcagtgatcg

SEQ ID NO: 2762 - DNA, 40 bp, Homo sapiens; identical to SEQ ID NO: 2609

SEQ ID NO: 2763 - DNA, 40 bp, Homo sapiens
tgtggtcacgtttctccctctctgctggcccccatctgtc

SEQ ID NO: 2764 - DNA, 40 bp, Homo sapiens
cttctcctcctgttcgccgcaggcgcccgtcccagtagtc

SEQ ID NO: 2765 - DNA, 40 bp, Homo sapiens
aacaactttgtgctggtgccggggaagtttgtgtctccaa

SEQ ID NO: 2766 - DNA, 40 bp, Homo sapiens
aaaagtaaacaacaatttgccgctgccagcctcccattag

SEQ ID NO: 2767 - DNA, 40 bp, Homo sapiens
atactagattaaatttcagccccgggccaatctgtcaaag

SEQ ID NO: 2768 - DNA, 40 bp, Homo sapiens
gaggtgtttgtgctccactcggctcccttggttacataac

SEQ ID NO: 2769 - DNA, 40 bp, Homo sapiens
atgtttaacagtccaggttttgtagaatatgtggtggacc

SEQ ID NO: 2770 - DNA, 40 bp, Homo sapiens
tcacatcccttgcatggtggagggtgagctttctgaaaac

SEQ ID NO: 2771 - DNA, 40 bp, Homo sapiens
cttcttgtataagcactgtgctaaaattgcagacactagg

SEQ ID NO: 2772 - DNA, 40 bp, Homo sapiens
tgagtatgatagaagtcagtgcactacagaactttgtctc

SEQ ID NO: 2773 - DNA, 40 bp, Homo sapiens
ctgcgctctcggaaatgactcgctccaatcccgcttcgcg

SEQ ID NO: 2774 - DNA, 40 bp, Homo sapiens
cagtgcaatgatattgtcaaagcatctgggaccagccttg

SEQ ID NO: 2775 - DNA, 40 bp, Homo sapiens
agtaaacaatgtcggctttccgcctcctcccctgccatcc

SEQ ID NO: 2776 - DNA, 40 bp, Homo sapiens; identical to SEQ ID NO: 2333

SEQ ID NO: 2777 - DNA, 40 bp, Homo sapiens
gcatctactgcagtgaaggcacttgtagcattatggtgac

SEQ ID NO: 2778 - DNA, 40 bp, Homo sapiens
ctcaggggcttcgccactgattgtccaaacgcaattcttg

SEQ ID NO: 2779 - DNA, 40 bp, Homo sapiens
gaaagtgcatacagcccctggccctctctgcccttccgtc

SEQ ID NO: 2780 - DNA, 40 bp, Homo sapiens; identical to SEQ ID NO: 2447

SEQ ID NO: 2781 - DNA, 40 bp, Homo sapiens
ttggcgtccttgtctctctctcccctgcccagtggcctcc

SEQ ID NO: 2782 - DNA, 40 bp, Homo sapiens; identical to SEQ ID NO: 2765

SEQ ID NO: 2783 - DNA, 40 bp, Homo sapiens
caacggaatcccaaaagcagctgttgtctccagagcattc

SEQ ID NO: 2784 - DNA, 40 bp, Homo sapiens
ttttgttcgttcggctcgcgtgaggcaggggcggcctctc

SEQ ID NO: 2785 - DNA, 40 bp, Homo sapiens
cggacagcgcgccggcaccttggctctagactgcttactg

SEQ ID NO: 2786 - DNA, 40 bp, Homo sapiens; identical to SEQ ID NO: 2326

SEQ ID NO: 2787 - DNA, 40 bp, Homo sapiens; identical to SEQ ID NO: 2330

SEQ ID NO: 2788 - DNA, 40 bp, Homo sapiens; identical to SEQ ID NO: 2331

SEQ ID NO: 2789 - DNA, 40 bp, Homo sapiens; identical to SEQ ID NO: 2333

SEQ ID NO: 2790 - DNA, 40 bp, Homo sapiens; identical to SEQ ID NO: 2588

SEQ ID NO: 2791 - DNA, 40 bp, Homo sapiens; identical to SEQ ID NO: 2285

SEQ ID NO: 2792 - DNA, 40 bp, Homo sapiens; identical to SEQ ID NO: 2475

SEQ ID NO: 2793 - DNA, 40 bp, Homo sapiens
ggttctactctcttacccctcccccacgtggttgttgctg

SEQ ID NO: 2794 - DNA, 40 bp, Homo sapiens; identical to SEQ ID NO: 2772

SEQ ID NO: 2795 - DNA, 40 bp, Homo sapiens; identical to SEQ ID NO: 2300

SEQ ID NO: 2796 - DNA, 40 bp, Homo sapiens; identical to SEQ ID NO: 2598

SEQ ID NO: 2797 - DNA, 40 bp, Homo sapiens
caatcctggctgcaggcatatttgcatattggatgctgtg

SEQ ID NO: 2798 - DNA, 40 bp, Homo sapiens
tctcaggctgtcgtcctctagagggaagcactttctgttg

SEQ ID NO: 2799 - DNA, 40 bp, Homo sapiens; identical to SEQ ID NO: 2783

SEQ ID NO: 2800 - DNA, 40 bp, Homo sapiens
tccttcattccaccggagtctgtctcatacccaaccagat

SEQ ID NO: 2801 - DNA, 40 bp, Homo sapiens; identical to SEQ ID NO: 2784

SEQ ID NO: 2802 - DNA, 40 bp, Homo sapiens
caaaagctcggtctgaggcccctcagtcttgcttcctaac

SEQ ID NO: 2803 - DNA, 40 bp, Homo sapiens
tgtgatgagctggcagtgtattgttagctggttgaatatg

SEQ ID NO: 2804 - DNA, 40 bp, Homo sapiens
gctgatctgtggcttaggtagtttcatgttgttgggattg

SEQ ID NO: 2805 - DNA, 40 bp, Homo sapiens; identical to SEQ ID NO: 2290

SEQ ID NO: 2806 - DNA, 40 bp, Homo sapiens; identical to SEQ ID NO: 2699

SEQ ID NO: 2807 - DNA, 40 bp, Homo sapiens; identical to SEQ ID NO: 2306

SEQ ID NO: 2808 - DNA, 40 bp, Homo sapiens; identical to SEQ ID NO: 2293

SEQ ID NO: 2809 - DNA, 40 bp, Homo sapiens; identical to SEQ ID NO: 2398

SEQ ID NO: 2810 - DNA, 40 bp, Homo sapiens; identical to SEQ ID NO: 2299

SEQ ID NO: 2811 - DNA, 40 bp, Homo sapiens; identical to SEQ ID NO: 2410

SEQ ID NO: 2812 - DNA, 40 bp, Homo sapiens; identical to SEQ ID NO: 2377

SEQ ID NO: 2813 - DNA, 40 bp, Homo sapiens; identical to SEQ ID NO: 2483

SEQ ID NO: 2814 - DNA, 40 bp, Homo sapiens
tgtctgtggtaccctactctggagagtgacaatcatgtat

SEQ ID NO: 2815 - DNA, 40 bp, Homo sapiens; identical to SEQ ID NO: 2413

SEQ ID NO: 2816 - DNA, 40 bp, Homo sapiens; identical to SEQ ID NO: 2772

SEQ ID NO: 2817 - DNA, 40 bp, Homo sapiens; identical to SEQ ID NO: 2391

SEQ ID NO: 2818 - DNA, 40 bp, Homo sapiens; identical to SEQ ID NO: 2414

SEQ ID NO: 2819 - DNA, 40 bp, Homo sapiens
agtttctttaattaatgaagtttttgggtctgctccactt

SEQ ID NO: 2820 - DNA, 40 bp, Homo sapiens; identical to SEQ ID NO: 2572

SEQ ID NO: 2821 - DNA, 40 bp, Homo sapiens; identical to SEQ ID NO: 2381

SEQ ID NO: 2822 - DNA, 40 bp, Homo sapiens; identical to SEQ ID NO: 2607

SEQ ID NO: 2823 - DNA, 40 bp, Homo sapiens; identical to SEQ ID NO: 2608

SEQ ID NO: 2824 - DNA, 40 bp, Homo sapiens; identical to SEQ ID NO: 2577

SEQ ID NO: 2825 - DNA, 40 bp, Homo sapiens; identical to SEQ ID NO: 2579

SEQ ID NO: 2826 - DNA, 40 bp, Homo sapiens; identical to SEQ ID NO: 2382

SEQ ID NO: 2827 - DNA, 40 bp, Homo sapiens
agtgattgtctagcaccatttgaaatcagtgttcttgggg

SEQ ID NO: 2828 - DNA, 40 bp, Homo sapiens; identical to SEQ ID NO: 2383

SEQ ID NO: 2829 - DNA, 40 bp, Homo sapiens; identical to SEQ ID NO: 2577

SEQ ID NO: 2830 - DNA, 40 bp, Homo sapiens; identical to SEQ ID NO: 2384

SEQ ID NO: 2831 - DNA, 40 bp, Homo sapiens; identical to SEQ ID NO: 2524

SEQ ID NO: 2832 - DNA, 40 bp, Homo sapiens; identical to SEQ ID NO: 2585

SEQ ID NO: 2833 - DNA, 40 bp, Homo sapiens; identical to SEQ ID NO: 2526

SEQ ID NO: 2834 - DNA, 40 bp, Homo sapiens; identical to SEQ ID NO: 2386

SEQ ID NO: 2835 - DNA, 40 bp, Homo sapiens
acctgatgctcacgtataagacgagcaaaaagcttgttgg

SEQ ID NO: 2836 - DNA, 40 bp, Homo sapiens; identical to SEQ ID NO: 2692

SEQ ID NO: 2837 - DNA, 40 bp, Homo sapiens; identical to SEQ ID NO: 2390

SEQ ID NO: 2838 - DNA, 40 bp, Homo sapiens; identical to SEQ ID NO: 2391

SEQ ID NO: 2839 - DNA, 40 bp, Homo sapiens; identical to SEQ ID NO: 2300

SEQ ID NO: 2840 - DNA, 40 bp, Homo sapiens; identical to SEQ ID NO: 2427

SEQ ID NO: 2841 - DNA, 40 bp, Homo sapiens; identical to SEQ ID NO: 2393

SEQ ID NO: 2842 - DNA, 40 bp, Homo sapiens; identical to SEQ ID NO: 2394

SEQ ID NO: 2843 - DNA, 40 bp, Homo sapiens; identical to SEQ ID NO: 2320

SEQ ID NO: 2844 - DNA, 40 bp, Homo sapiens; identical to SEQ ID NO: 2308

SEQ ID NO: 2845 - DNA, 40 bp, Homo sapiens
gtgcattgctgttgcattgcacgtgtgtgaggcgggtgca

SEQ ID NO: 2846 - DNA, 40 bp, Homo sapiens
cagaggggaggcccagaggagagggaagcttgggcaaagg

SEQ ID NO: 2847 - DNA, 40 bp, Homo sapiens
tcggatccgtctgagcttggctggtcggaagtctcatcat

SEQ ID NO: 2848 - DNA, 40 bp, Homo sapiens
tggagacccactgccccaggtgctgctgggggttgtagtc

SEQ ID NO: 2849 - DNA, 40 bp, Homo sapiens; identical to SEQ ID NO: 2287

SEQ ID NO: 2850 - DNA, 40 bp, Homo sapiens
ctgctccgctcagagccttttcctctccacttcctgttca

SEQ ID NO: 2851 - DNA, 40 bp, Homo sapiens; identical to SEQ ID NO: 2304

SEQ ID NO: 2852 - DNA, 40 bp, Homo sapiens
ctctgtggccatttcggtttttccagtccgatgcccctga

SEQ ID NO: 2853 - DNA, 40 bp, Homo sapiens; identical to SEQ ID NO: 2626

SEQ ID NO: 2854 - DNA, 40 bp, Homo sapiens; identical to SEQ ID NO: 2760

SEQ ID NO: 2855 - DNA, 40 bp, Homo sapiens
ggtgtttgtgctccactcagctcccttggttacataacag

SEQ ID NO: 2856 - DNA, 40 bp, Homo sapiens; identical to SEQ ID NO: 2763

SEQ ID NO: 2857 - DNA, 40 bp, Homo sapiens; identical to SEQ ID NO: 2308

SEQ ID NO: 2858 - DNA, 40 bp, Homo sapiens; identical to SEQ ID NO: 2845

SEQ ID NO: 2859 - DNA, 40 bp, Homo sapiens; identical to SEQ ID NO: 2312

SEQ ID NO: 2860 - DNA, 40 bp, Homo sapiens
taaatgtgtaatttctcccttgacggcccccggccgctgg

SEQ ID NO: 2861 - DNA, 40 bp, Homo sapiens
atgcaatgcacccgggcaaggattctgagagggtgagccc

SEQ ID NO: 2862 - DNA, 40 bp, Homo sapiens; identical to SEQ ID NO: 2330

SEQ ID NO: 2863 - DNA, 40 bp, Homo sapiens; identical to SEQ ID NO: 2331

SEQ ID NO: 2864 - DNA, 40 bp, Homo sapiens
caggtgggtgctgaggccgcgttgttgcttgaagctagcc

SEQ ID NO: 2865 - DNA, 40 bp, Homo sapiens
aggctgggaaggcaaagggacgttcaattgtcatcactgg

SEQ ID NO: 2866 - DNA, 40 bp, Homo sapiens; identical to SEQ ID NO: 2314

SEQ ID NO: 2867 - DNA, 40 bp, Homo sapiens; identical to SEQ ID NO: 2616

SEQ ID NO: 2868 - DNA, 40 bp, Homo sapiens; identical to SEQ ID NO: 2316

SEQ ID NO: 2869 - DNA, 40 bp, Homo sapiens
caatcacagatagcacccctcaccttgagcccattttcac

SEQ ID NO: 2870 - DNA, 40 bp, Homo sapiens; identical to SEQ ID NO: 2337

SEQ ID NO: 2871 - DNA, 40 bp, Homo sapiens
ctgactatgcctccccgcatcccctagggcattggtgtaa

SEQ ID NO: 2872 - DNA, 40 bp, Homo sapiens; identical to SEQ ID NO: 2287

SEQ ID NO: 2873 - DNA, 40 bp, Homo sapiens; identical to SEQ ID NO: 2288

SEQ ID NO: 2874 - DNA, 40 bp, Homo sapiens; identical to SEQ ID NO: 2377

SEQ ID NO: 2875 - DNA, 40 bp, Homo sapiens; identical to SEQ ID NO: 2412

SEQ ID NO: 2876 - DNA, 40 bp, Homo sapiens; identical to SEQ ID NO: 2430

SEQ ID NO: 2877 - DNA, 40 bp, Homo sapiens
tcggtttggttcagctggtatgctttccagtatctcattc

SEQ ID NO: 2878 - DNA, 40 bp, Homo sapiens; identical to SEQ ID NO: 2486

SEQ ID NO: 2879 - DNA, 40 bp, Homo sapiens; identical to SEQ ID NO: 2413

SEQ ID NO: 2880 - DNA, 40 bp, Homo sapiens; identical to SEQ ID NO: 2391

SEQ ID NO: 2881 - DNA, 40 bp, Homo sapiens; identical to SEQ ID NO: 2414

SEQ ID NO: 2882 - DNA, 40 bp, Homo sapiens
aaggtctggattgatcgtactgctttctgaaaggtaaaaa

SEQ ID NO: 2883 - DNA, 40 bp, Homo sapiens; identical to SEQ ID NO: 2572

SEQ ID NO: 2884 - DNA, 40 bp, Homo sapiens; identical to SEQ ID NO: 2381

SEQ ID NO: 2885 - DNA, 40 bp, Homo sapiens; identical to SEQ ID NO: 2607

SEQ ID NO: 2886 - DNA, 40 bp, Homo sapiens; identical to SEQ ID NO: 2506

SEQ ID NO: 2887 - DNA, 40 bp, Homo sapiens; identical to SEQ ID NO: 2382

SEQ ID NO: 2888 - DNA, 40 bp, Homo sapiens
ggttttgtgtttttgtaaacagcagaaggtattagtccat

SEQ ID NO: 2889 - DNA, 40 bp, Homo sapiens; identical to SEQ ID NO: 2383

SEQ ID NO: 2890 - DNA, 40 bp, Homo sapiens; identical to SEQ ID NO: 2384

SEQ ID NO: 2891 - DNA, 40 bp, Homo sapiens; identical to SEQ ID NO: 2524

SEQ ID NO: 2892 - DNA, 40 bp, Homo sapiens; identical to SEQ ID NO: 2525

SEQ ID NO: 2893 - DNA, 40 bp, Homo sapiens
gggggccgatacactgtacgagagtgagtagcaggtctca

SEQ ID NO: 2894 - DNA, 40 bp, Homo sapiens; identical to SEQ ID NO: 2332

SEQ ID NO: 2895 - DNA, 40 bp, Homo sapiens; identical to SEQ ID NO: 2386

SEQ ID NO: 2896 - DNA, 40 bp, Homo sapiens; identical to SEQ ID NO: 2692

SEQ ID NO: 2897 - DNA, 40 bp, Homo sapiens
tcagtttggttcagctggtatgctttccagtatctcattc

SEQ ID NO: 2898 - DNA, 40 bp, Homo sapiens; identical to SEQ ID NO: 2298

SEQ ID NO: 2899 - DNA, 40 bp, Homo sapiens
cactttttcctttgtggaaatcctgggtgacatcacctcc

SEQ ID NO: 2900 - DNA, 40 bp, Homo sapiens
gactgcagagcaaaagacacgatgggtgtctattgttttc

SEQ ID NO: 2901 - DNA, 40 bp, Homo sapiens
ttttcctgcttgatttgcttaatggaagctgacagtgaag

SEQ ID NO: 2902 - DNA, 40 bp, Homo sapiens; identical to SEQ ID NO: 2389

SEQ ID NO: 2903 - DNA, 40 bp, Homo sapiens; identical to SEQ ID NO: 2390

SEQ ID NO: 2904 - DNA, 40 bp, Homo sapiens; identical to SEQ ID NO: 2391

SEQ ID NO: 2905 - DNA, 40 bp, Homo sapiens; identical to SEQ ID NO: 2544

SEQ ID NO: 2906 - DNA, 40 bp, Homo sapiens; identical to SEQ ID NO: 2300

SEQ ID NO: 2907 - DNA, 40 bp, Homo sapiens; identical to SEQ ID NO: 2393

SEQ ID NO: 2908 - DNA, 40 bp, Homo sapiens; identical to SEQ ID NO: 2394

SEQ ID NO: 2909 - DNA, 40 bp, Homo sapiens; identical to SEQ ID NO: 2713

SEQ ID NO: 2910 - DNA, 40 bp, Homo sapiens
cattatgcaaatggtatgagaggaaaattaggcaataagg

SEQ ID NO: 2911 - DNA, 40 bp, Homo sapiens; identical to SEQ ID NO: 2571

SEQ ID NO: 2912 - DNA, 40 bp, Homo sapiens; identical to SEQ ID NO: 2699

SEQ ID NO: 2913 - DNA, 40 bp, Homo sapiens; identical to SEQ ID NO: 2306

SEQ ID NO: 2914 - DNA, 40 bp, Homo sapiens; identical to SEQ ID NO: 2293

SEQ ID NO: 2915 - DNA, 40 bp, Homo sapiens; identical to SEQ ID NO: 2291

SEQ ID NO: 2916 - DNA, 40 bp, Homo sapiens; identical to SEQ ID NO: 2398

SEQ ID NO: 2917 - DNA, 40 bp, Homo sapiens; identical to SEQ ID NO: 2827

SEQ ID NO: 2918 - DNA, 40 bp, Homo sapiens
ttttgtctagcaccatttgaaatcggttatgatgtagggg

SEQ ID NO: 2919 - DNA, 40 bp, Homo sapiens
caagtggttaattgagcccacaagtgacctactcaatcag

SEQ ID NO: 2920 - DNA, 40 bp, Homo sapiens; identical to SEQ ID NO: 2451

SEQ ID NO: 2921 - DNA, 40 bp, Homo sapiens
tgtctgcacctgtcactagcagtgcaatgttaaaagggca

SEQ ID NO: 2922 - DNA, 40 bp, Homo sapiens; identical to SEQ ID NO: 2311

SEQ ID NO: 2923 - DNA, 40 bp, Homo sapiens; identical to SEQ ID NO: 2588

SEQ ID NO: 2924 - DNA, 40 bp, Homo sapiens
gatctcgtgctgtgaccctctagagggaagcactttctgt

SEQ ID NO: 2925 - DNA, 40 bp, Homo sapiens; identical to SEQ ID NO: 2588

SEQ ID NO: 2926 - DNA, 40 bp, Homo sapiens; identical to SEQ ID NO: 2475

SEQ ID NO: 2927 - DNA, 40 bp, Homo sapiens; identical to SEQ ID NO: 2735

SEQ ID NO: 2928 - DNA, 40 bp, Homo sapiens; identical to SEQ ID NO: 2299

SEQ ID NO: 2929 - DNA, 40 bp, Homo sapiens; identical to SEQ ID NO: 2827

SEQ ID NO: 2930 - DNA, 40 bp, Homo sapiens; identical to SEQ ID NO: 2544

SEQ ID NO: 2931 - DNA, 40 bp, Homo sapiens
tctttgtatctagcaccatttgaaatcagtgttttaggag

SEQ ID NO: 2932 - DNA, 40 bp, Homo sapiens; identical to SEQ ID NO: 2300

SEQ ID NO: 2933 - DNA, 40 bp, Homo sapiens; identical to SEQ ID NO: 2301

SEQ ID NO: 2934 - DNA, 40 bp, Homo sapiens
tgaggtagtagattgtatagttttagggtcataccccatc

SEQ ID NO: 2935 - DNA, 40 bp, Homo sapiens; identical to SEQ ID NO: 2598

SEQ ID NO: 2936 - DNA, 40 bp, Homo sapiens; identical to SEQ ID NO: 2287

SEQ ID NO: 2937 - DNA, 40 bp, Homo sapiens; identical to SEQ ID NO: 2302

SEQ ID NO: 2938 - DNA, 40 bp, Homo sapiens; identical to SEQ ID NO: 2378

SEQ ID NO: 2939 - DNA, 40 bp, Homo sapiens; identical to SEQ ID NO: 2711

SEQ ID NO: 2940 - DNA, 40 bp, Homo sapiens; identical to SEQ ID NO: 2413

SEQ ID NO: 2941 - DNA, 40 bp, Homo sapiens; identical to SEQ ID NO: 2752

SEQ ID NO: 2942 - DNA, 40 bp, Homo sapiens; identical to SEQ ID NO: 2626

SEQ ID NO: 2943 - DNA, 40 bp, Homo sapiens; identical to SEQ ID NO: 2778

SEQ ID NO: 2944 - DNA, 40 bp, Homo sapiens; identical to SEQ ID NO: 2324

SEQ ID NO: 2945 - DNA, 40 bp, Homo sapiens; identical to SEQ ID NO: 2293

SEQ ID NO: 2946 - DNA, 40 bp, Homo sapiens; identical to SEQ ID NO: 2765

SEQ ID NO: 2947 - DNA, 40 bp, Homo sapiens; identical to SEQ ID NO: 2785

SEQ ID NO: 2948 - DNA, 40 bp, Homo sapiens; identical to SEQ ID NO: 2326

SEQ ID NO: 2949 - DNA, 40 bp, Homo sapiens; identical to SEQ ID NO: 2330

SEQ ID NO: 2950 - DNA, 40 bp, Homo sapiens; identical to SEQ ID NO: 2331

SEQ ID NO: 2951 - DNA, 40 bp, Homo sapiens
ttctttgtctatacatttcctagatttctatgcagttggg

SEQ ID NO: 2952 - DNA, 40 bp, Homo sapiens; identical to SEQ ID NO: 2285

SEQ ID NO: 2953 - DNA, 40 bp, Homo sapiens; identical to SEQ ID NO: 2288

SEQ ID NO: 2954 - DNA, 40 bp, Homo sapiens; identical to SEQ ID NO: 2300

SEQ ID NO: 2955 - DNA, 40 bp, Homo sapiens; identical to SEQ ID NO: 2377

SEQ ID NO: 2956 - DNA, 40 bp, Homo sapiens; identical to SEQ ID NO: 2430

SEQ ID NO: 2957 - DNA, 40 bp, Homo sapiens; identical to SEQ ID NO: 2413

SEQ ID NO: 2958 - DNA, 40 bp, Homo sapiens
gagggattacagattaactcccacttctccagactcagaa

SEQ ID NO: 2959 - DNA, 40 bp, Homo sapiens; identical to SEQ ID NO: 2715

SEQ ID NO: 2960 - DNA, 40 bp, Homo sapiens
cgaggaggaggtgactgctgtggatggttatgagacagac

SEQ ID NO: 2961 - DNA, 40 bp, Homo sapiens
ctccagtgtggtgtgcctgcccccttccgtcattgctgtg

SEQ ID NO: 2962 - DNA, 40 bp, Homo sapiens; identical to SEQ ID NO: 2381

SEQ ID NO: 2963 - DNA, 40 bp, Homo sapiens; identical to SEQ ID NO: 2607

SEQ ID NO: 2964 - DNA, 40 bp, Homo sapiens; identical to SEQ ID NO: 2608

SEQ ID NO: 2965 - DNA, 40 bp, Homo sapiens; identical to SEQ ID NO: 2658

SEQ ID NO: 2966 - DNA, 40 bp, Homo sapiens
ctggtcagttgggagtctgagatgaagcactgtagctcag

SEQ ID NO: 2967 - DNA, 40 bp, Homo sapiens
aaagaaaagaaagtgcttcctttcagagggttactctttg

SEQ ID NO: 2968 - DNA, 40 bp, Homo sapiens; identical to SEQ ID NO: 2735

SEQ ID NO: 2969 - DNA, 40 bp, Homo sapiens; identical to SEQ ID NO: 2317

SEQ ID NO: 2970 - DNA, 40 bp, Homo sapiens; identical to SEQ ID NO: 2391

SEQ ID NO: 2971 - DNA, 40 bp, Homo sapiens; identical to SEQ ID NO: 2300

SEQ ID NO: 2972 - DNA, 40 bp, Homo sapiens; identical to SEQ ID NO: 2301

SEQ ID NO: 2973 - DNA, 40 bp, Homo sapiens; identical to SEQ ID NO: 2302

SEQ ID NO: 2974 - DNA, 40 bp, Homo sapiens; identical to SEQ ID NO: 2393

SEQ ID NO: 2975 - DNA, 40 bp, Homo sapiens; identical to SEQ ID NO: 2377

SEQ ID NO: 2976 - DNA, 40 bp, Homo sapiens; identical to SEQ ID NO: 2772

SEQ ID NO: 2977 - DNA, 40 bp, Homo sapiens; identical to SEQ ID NO: 2414

SEQ ID NO: 2978 - DNA, 40 bp, Homo sapiens; identical to SEQ ID NO: 2380

SEQ ID NO: 2979 - DNA, 40 bp, Homo sapiens; identical to SEQ ID NO: 2572

SEQ ID NO: 2980 - DNA, 40 bp, Homo sapiens; identical to SEQ ID NO: 2381

SEQ ID NO: 2981 - DNA, 40 bp, Homo sapiens; identical to SEQ ID NO: 2763

SEQ ID NO: 2982 - DNA, 40 bp, Homo sapiens; identical to SEQ ID NO: 2447

SEQ ID NO: 2983 - DNA, 40 bp, Homo sapiens; identical to SEQ ID NO: 2382

SEQ ID NO: 2984 - DNA, 40 bp, Homo sapiens; identical to SEQ ID NO: 2784

SEQ ID NO: 2985 - DNA, 40 bp, Homo sapiens; identical to SEQ ID NO: 2383

SEQ ID NO: 2986 - DNA, 40 bp, Homo sapiens; identical to SEQ ID NO: 2384

SEQ ID NO: 2987 - DNA, 40 bp, Homo sapiens; identical to SEQ ID NO: 2448

SEQ ID NO: 2988 - DNA, 40 bp, Homo sapiens; identical to SEQ ID NO: 2451

SEQ ID NO: 2989 - DNA, 40 bp, Homo sapiens
gtgaacatcacagcaagtctgtgctgcttcccgtccctac

SEQ ID NO: 2990 - DNA, 40 bp, Homo sapiens; identical to SEQ ID NO: 2386

SEQ ID NO: 2991 - DNA, 40 bp, Homo sapiens; identical to SEQ ID NO: 2283

SEQ ID NO: 2992 - DNA, 40 bp, Homo sapiens; identical to SEQ ID NO: 2388

SEQ ID NO: 2993 - DNA, 40 bp, Homo sapiens; identical to SEQ ID NO: 2390

SEQ ID NO: 2994 - DNA, 40 bp, Homo sapiens; identical to SEQ ID NO: 2391

SEQ ID NO: 2995 - DNA, 40 bp, Homo sapiens; identical to SEQ ID NO: 2300

SEQ ID NO: 2996 - DNA, 40 bp, Homo sapiens; identical to SEQ ID NO: 2427

SEQ ID NO: 2997 - DNA, 40 bp, Homo sapiens; identical to SEQ ID NO: 2393

SEQ ID NO: 2998 - DNA, 40 bp, Homo sapiens; identical to SEQ ID NO: 2394

SEQ ID NO: 2999 - DNA, 40 bp, Homo sapiens; identical to SEQ ID NO: 2453

SEQ ID NO: 3000 - DNA, 40 bp, Homo sapiens; identical to SEQ ID NO: 2771

SEQ ID NO: 3001 - DNA, 40 bp, Homo sapiens; identical to SEQ ID NO: 2321

SEQ ID NO: 3002 - DNA, 40 bp, Homo sapiens; identical to SEQ ID NO: 2715

SEQ ID NO: 3003 - DNA, 40 bp, Homo sapiens; identical to SEQ ID NO: 2290

SEQ ID NO: 3004 - DNA, 40 bp, Homo sapiens; identical to SEQ ID NO: 2305

SEQ ID NO: 3005 - DNA, 40 bp, Homo sapiens; identical to SEQ ID NO: 2699

SEQ ID NO: 3006 - DNA, 40 bp, Homo sapiens; identical to SEQ ID NO: 2306

SEQ ID NO: 3007 - DNA, 40 bp, Homo sapiens; identical to SEQ ID NO: 2293

SEQ ID NO: 3008 - DNA, 40 bp, Homo sapiens
ggtgcactctaaattcctgtccctgcggaaggctgactaa

SEQ ID NO: 3009 - DNA, 40 bp, Homo sapiens; identical to SEQ ID NO: 2398

SEQ ID NO: 3010 - DNA, 40 bp, Homo sapiens; identical to SEQ ID NO: 2433

SEQ ID NO: 3011 - DNA, 40 bp, Homo sapiens; identical to SEQ ID NO: 2735

SEQ ID NO: 3012 - DNA, 40 bp, Homo sapiens; identical to SEQ ID NO: 2299

SEQ ID NO: 3013 - DNA, 40 bp, Homo sapiens; identical to SEQ ID NO: 2300

SEQ ID NO: 3014 - DNA, 40 bp, Homo sapiens; identical to SEQ ID NO: 2341

SEQ ID NO: 3015 - DNA, 40 bp, Homo sapiens; identical to SEQ ID NO: 2342

SEQ ID NO: 3016 - DNA, 40 bp, Homo sapiens; identical to SEQ ID NO: 2301

SEQ ID NO: 3017 - DNA, 40 bp, Homo sapiens; identical to SEQ ID NO: 2302

SEQ ID NO: 3018 - DNA, 40 bp, Homo sapiens; identical to SEQ ID NO: 2394

SEQ ID NO: 3019 - DNA, 40 bp, Homo sapiens; identical to SEQ ID NO: 2431

SEQ ID NO: 3020 - DNA, 40 bp, Homo sapiens
cacaggatttcaggggagaaacggtggattttcacaagag

SEQ ID NO: 3021 - DNA, 40 bp, Homo sapiens
gagatgaggtagctgccaggtgccatgggggtataggtga

SEQ ID NO: 3022 - DNA, 40 bp, Homo sapiens; identical to SEQ ID NO: 2625

SEQ ID NO: 3023 - DNA, 40 bp, Homo sapiens; identical to SEQ ID NO: 2626

SEQ ID NO: 3024 - DNA, 40 bp, Homo sapiens; identical to SEQ ID NO: 2686

SEQ ID NO: 3025 - DNA, 40 bp, Homo sapiens
gaaaaacttaagattccctctcggccctcatttttagctg

SEQ ID NO: 3026 - DNA, 40 bp, Homo sapiens; identical to SEQ ID NO: 2779

SEQ ID NO: 3027 - DNA, 40 bp, Homo sapiens; identical to SEQ ID NO: 2447

SEQ ID NO: 3028 - DNA, 40 bp, Homo sapiens
gctcactgggcaggagccctaatcggattcgacagctgag

SEQ ID NO: 3029 - DNA, 40 bp, Homo sapiens
cagatattttctcaggcaatcctcagccacagccttcttg

SEQ ID NO: 3030 - DNA, 40 bp, Homo sapiens
cggactaacactccgcgggtgtttccatggagaccgaggc

SEQ ID NO: 3031 - DNA, 40 bp, Homo sapiens; identical to SEQ ID NO: 2631

SEQ ID NO: 3032 - DNA, 40 bp, Homo sapiens; identical to SEQ ID NO: 2369

SEQ ID NO: 3033 - DNA, 40 bp, Homo sapiens; identical to SEQ ID NO: 2327

SEQ ID NO: 3034 - DNA, 40 bp, Homo sapiens; identical to SEQ ID NO: 2448

SEQ ID NO: 3035 - DNA, 40 bp, Homo sapiens
gttgtagcatgtggttgtattaatgaacgttacaggagag

SEQ ID NO: 3036 - DNA, 40 bp, Homo sapiens; identical to SEQ ID NO: 2585

SEQ ID NO: 3037 - DNA, 40 bp, Homo sapiens
tattatacatcatttcccatcaatcgacgaactaaagcct

SEQ ID NO: 3038 - DNA, 40 bp, Homo sapiens; identical to SEQ ID NO: 2408

SEQ ID NO: 3039 - DNA, 40 bp, Homo sapiens; identical to SEQ ID NO: 2386

SEQ ID NO: 3040 - DNA, 40 bp, Homo sapiens; identical to SEQ ID NO: 2283

SEQ ID NO: 3041 - DNA, 40 bp, Homo sapiens; identical to SEQ ID NO: 2284

SEQ ID NO: 3042 - DNA, 40 bp, Homo sapiens; identical to SEQ ID NO: 2616

SEQ ID NO: 3043 - DNA, 40 bp, Homo sapiens; identical to SEQ ID NO: 2285

SEQ ID NO: 3044 - DNA, 40 bp, Homo sapiens; identical to SEQ ID NO: 2558

SEQ ID NO: 3045 - DNA, 40 bp, Homo sapiens; identical to SEQ ID NO: 2676

SEQ ID NO: 3046 - DNA, 40 bp, Homo sapiens; identical to SEQ ID NO: 2390

SEQ ID NO: 3047 - DNA, 40 bp, Homo sapiens; identical to SEQ ID NO: 2391

SEQ ID NO: 3048 - DNA, 40 bp, Homo sapiens; identical to SEQ ID NO: 2287

SEQ ID NO: 3049 - DNA, 40 bp, Homo sapiens
aaggaaaatcaaacccacaatgctgaacacaacaatgacc

SEQ ID NO: 3050 - DNA, 40 bp, Homo sapiens; identical to SEQ ID NO: 2341

SEQ ID NO: 3051 - DNA, 40 bp, Homo sapiens; identical to SEQ ID NO: 2302

SEQ ID NO: 3052 - DNA, 40 bp, Homo sapiens; identical to SEQ ID NO: 2394

SEQ ID NO: 3053 - DNA, 40 bp, Homo sapiens; identical to SEQ ID NO: 2321

SEQ ID NO: 3054 - DNA, 40 bp, Homo sapiens; identical to SEQ ID NO: 2290

SEQ ID NO: 3055 - DNA, 40 bp, Homo sapiens; identical to SEQ ID NO: 2324

SEQ ID NO: 3056 - DNA, 40 bp, Homo sapiens; identical to SEQ ID NO: 2298

SEQ ID NO: 3057 - DNA, 40 bp, Homo sapiens; identical to SEQ ID NO: 2735

SEQ ID NO: 3058 - DNA, 40 bp, Homo sapiens; identical to SEQ ID NO: 2390

SEQ ID NO: 3059 - DNA, 40 bp, Homo sapiens; identical to SEQ ID NO: 2299

SEQ ID NO: 3060 - DNA, 40 bp, Homo sapiens; identical to SEQ ID NO: 2287

SEQ ID NO: 3061 - DNA, 40 bp, Homo sapiens; identical to SEQ ID NO: 2300

SEQ ID NO: 3062 - DNA, 40 bp, Homo sapiens; identical to SEQ ID NO: 2341

SEQ ID NO: 3063 - DNA, 40 bp, Homo sapiens; identical to SEQ ID NO: 2301

SEQ ID NO: 3064 - DNA, 40 bp, Homo sapiens; identical to SEQ ID NO: 2302

SEQ ID NO: 3065 - DNA, 40 bp, Homo sapiens
accagacttttcctagtccctgagaccctaacttgtgagg

SEQ ID NO: 3066 - DNA, 40 bp, Homo sapiens; identical to SEQ ID NO: 2653

SEQ ID NO: 3067 - DNA, 40 bp, Homo sapiens
tccctgagaccctaacttgtgatgtttaccgtttaaatcc

SEQ ID NO: 3068 - DNA, 40 bp, Homo sapiens; identical to SEQ ID NO: 2293

SEQ ID NO: 3069 - DNA, 40 bp, Homo sapiens; identical to SEQ ID NO: 2309

SEQ ID NO: 3070 - DNA, 40 bp, Homo sapiens; identical to SEQ ID NO: 2355

SEQ ID NO: 3071 - DNA, 40 bp, Homo sapiens; identical to SEQ ID NO: 2358

SEQ ID NO: 3072 - DNA, 40 bp, Homo sapiens; identical to SEQ ID NO: 2558

SEQ ID NO: 3073 - DNA, 40 bp, Homo sapiens; identical to SEQ ID NO: 2362

SEQ ID NO: 3074 - DNA, 40 bp, Homo sapiens; identical to SEQ ID NO: 2319

SEQ ID NO: 3075 - DNA, 40 bp, Homo sapiens; identical to SEQ ID NO: 2764

SEQ ID NO: 3076 - DNA, 40 bp, Homo sapiens
gccttcgccgcacacaagctcgtgtctgtgggtccgtgtc

SEQ ID NO: 3077 - DNA, 40 bp, Homo sapiens
cgagctctggctccgtgtcttcactcccgtgcttgtccga

SEQ ID NO: 3078 - DNA, 40 bp, Homo sapiens; identical to SEQ ID NO: 2712

SEQ ID NO: 3079 - DNA, 40 bp, Homo sapiens; identical to SEQ ID NO: 2466

SEQ ID NO: 3080 - DNA, 40 bp, Homo sapiens; identical to SEQ ID NO: 2290

SEQ ID NO: 3081 - DNA, 40 bp, Homo sapiens; identical to SEQ ID NO: 2571

SEQ ID NO: 3082 - DNA, 40 bp, Homo sapiens; identical to SEQ ID NO: 2699

SEQ ID NO: 3083 - DNA, 40 bp, Homo sapiens; identical to SEQ ID NO: 2502

SEQ ID NO: 3084 - DNA, 40 bp, Homo sapiens; identical to SEQ ID NO: 2306

SEQ ID NO: 3085 - DNA, 40 bp, Homo sapiens; identical to SEQ ID NO: 2293

SEQ ID NO: 3086 - DNA, 40 bp, Homo sapiens; identical to SEQ ID NO: 2407

SEQ ID NO: 3087 - DNA, 40 bp, Homo sapiens; identical to SEQ ID NO: 2294

SEQ ID NO: 3088 - DNA, 40 bp, Homo sapiens; identical to SEQ ID NO: 2398

SEQ ID NO: 3089 - DNA, 40 bp, Homo sapiens; identical to SEQ ID NO: 2728

SEQ ID NO: 3090 - DNA, 40 bp, Homo sapiens; identical to SEQ ID NO: 2451

SEQ ID NO: 3091 - DNA, 40 bp, Homo sapiens; identical to SEQ ID NO: 2297

SEQ ID NO: 3092 - DNA, 40 bp, Homo sapiens; identical to SEQ ID NO: 2735

SEQ ID NO: 3093 - DNA, 40 bp, Homo sapiens; identical to SEQ ID NO: 2299

SEQ ID NO: 3094 - DNA, 40 bp, Homo sapiens; identical to SEQ ID NO: 2300

SEQ ID NO: 3095 - DNA, 40 bp, Homo sapiens; identical to SEQ ID NO: 2301

SEQ ID NO: 3096 - DNA, 40 bp, Homo sapiens; identical to SEQ ID NO: 2302

SEQ ID NO: 3097 - DNA, 40 bp, Homo sapiens; identical to SEQ ID NO: 2394

SEQ ID NO: 3098 - DNA, 40 bp, Homo sapiens; identical to SEQ ID NO: 2711

SEQ ID NO: 3099 - DNA, 40 bp, Homo sapiens; identical to SEQ ID NO: 3020

SEQ ID NO: 3100 - DNA, 40 bp, Homo sapiens; identical to SEQ ID NO: 2714

SEQ ID NO: 3101 - DNA, 40 bp, Homo sapiens
caaatggcgcatcaatgactatcgctcttacaaagctctt

SEQ ID NO: 3102 - DNA, 40 bp, Homo sapiens
cagaacatgcaatgcaactacaatgcaccacagctgcccg

SEQ ID NO: 3103 - DNA, 40 bp, Homo sapiens; identical to SEQ ID NO: 2290

SEQ ID NO: 3104 - DNA, 40 bp, Homo sapiens; identical to SEQ ID NO: 2719

SEQ ID NO: 3105 - DNA, 40 bp, Homo sapiens; identical to SEQ ID NO: 3021

SEQ ID NO: 3106 - DNA, 40 bp, Homo sapiens; identical to SEQ ID NO: 2414

SEQ ID NO: 3107 - DNA, 40 bp, Homo sapiens; identical to SEQ ID NO: 2699

SEQ ID NO: 3108 - DNA, 40 bp, Homo sapiens
gctgacgtcacgggcagaattgtcccatttagggatcccg

SEQ ID NO: 3109 - DNA, 40 bp, Homo sapiens
ctcaggccattaacctcagttggtcactaatccctaggaa

SEQ ID NO: 3110 - DNA, 40 bp, Homo sapiens
gaatcttgcccttggatgcatactgtaatttccattaaag

SEQ ID NO: 3111 - DNA, 40 bp, Homo sapiens; identical to SEQ ID NO: 2407

SEQ ID NO: 3112 - DNA, 40 bp, Homo sapiens; identical to SEQ ID NO: 2294

SEQ ID NO: 3113 - DNA, 40 bp, Homo sapiens
ctgatagtacacggggccaaaatagatgtatgcttctaag

SEQ ID NO: 3114 - DNA, 40 bp, Homo sapiens; identical to SEQ ID NO: 2295

SEQ ID NO: 3115 - DNA, 40 bp, Homo sapiens; identical to SEQ ID NO: 2447

SEQ ID NO: 3116 - DNA, 40 bp, Homo sapiens
tgaggccctctaggccgtgaattaatgtgtcataactcac

SEQ ID NO: 3117 - DNA, 40 bp, Homo sapiens; identical to SEQ ID NO: 2512

SEQ ID NO: 3118 - DNA, 40 bp, Homo sapiens; identical to SEQ ID NO: 2382

SEQ ID NO: 3119 - DNA, 40 bp, Homo sapiens; identical to SEQ ID NO: 2728

SEQ ID NO: 3120 - DNA, 40 bp, Homo sapiens
ttggcctcctaagccagggattgtgggttcgagtcccacc

SEQ ID NO: 3121 - DNA, 40 bp, Homo sapiens; identical to SEQ ID NO: 2519

SEQ ID NO: 3122 - DNA, 40 bp, Homo sapiens
tttttgctcccagtcagtaggaagattgtttcaaatctgt

SEQ ID NO: 3123 - DNA, 40 bp, Homo sapiens; identical to SEQ ID NO: 2433

SEQ ID NO: 3124 - DNA, 40 bp, Homo sapiens; identical to SEQ ID NO: 2369

SEQ ID NO: 3125 - DNA, 40 bp, Homo sapiens; identical to SEQ ID NO: 2296

SEQ ID NO: 3126 - DNA, 40 bp, Homo sapiens; identical to SEQ ID NO: 2451

SEQ ID NO: 3127 - DNA, 40 bp, Homo sapiens
ctgactttcagttcctatttaaaatgtctgaattgggagc

SEQ ID NO: 3128 - DNA, 40 bp, Homo sapiens; identical to SEQ ID NO: 2530

SEQ ID NO: 3129 - DNA, 40 bp, Homo sapiens
tagcacttagcaggttgtattatcattgtccgtgtctatg

SEQ ID NO: 3130 - DNA, 40 bp, Homo sapiens; identical to SEQ ID NO: 2386

SEQ ID NO: 3131 - DNA, 40 bp, Homo sapiens; identical to SEQ ID NO: 2835

SEQ ID NO: 3132 - DNA, 40 bp, Homo sapiens; identical to SEQ ID NO: 2297

SEQ ID NO: 3133 - DNA, 40 bp, Homo sapiens; identical to SEQ ID NO: 2298

SEQ ID NO: 3134 - DNA, 40 bp, Homo sapiens; identical to SEQ ID NO: 2899

SEQ ID NO: 3135 - DNA, 40 bp, Homo sapiens; identical to SEQ ID NO: 2901

SEQ ID NO: 3136 - DNA, 40 bp, Homo sapiens
ggagacactgtaacaacattttactcctgactgattacat

SEQ ID NO: 3137 - DNA, 40 bp, Homo sapiens; identical to SEQ ID NO: 2389

SEQ ID NO: 3138 - DNA, 40 bp, Homo sapiens; identical to SEQ ID NO: 2390

SEQ ID NO: 3139 - DNA, 40 bp, Homo sapiens; identical to SEQ ID NO: 2391

SEQ ID NO: 3140 - DNA, 40 bp, Homo sapiens; identical to SEQ ID NO: 2299

SEQ ID NO: 3141 - DNA, 40 bp, Homo sapiens; identical to SEQ ID NO: 2300

SEQ ID NO: 3142 - DNA, 40 bp, Homo sapiens; identical to SEQ ID NO: 2341

SEQ ID NO: 3143 - DNA, 40 bp, Homo sapiens; identical to SEQ ID NO: 2301

SEQ ID NO: 3144 - DNA, 40 bp, Homo sapiens; identical to SEQ ID NO: 2302

SEQ ID NO: 3145 - DNA, 40 bp, Homo sapiens; identical to SEQ ID NO: 2394

SEQ ID NO: 3146 - DNA, 40 bp, Homo sapiens; identical to SEQ ID NO: 2410

SEQ ID NO: 3147 - DNA, 40 bp, Homo sapiens; identical to SEQ ID NO: 2367

SEQ ID NO: 3148 - DNA, 40 bp, Homo sapiens
aaaaccaaatggctggctactcatgtactgttgaatgtct

SEQ ID NO: 3149 - DNA, 40 bp, Homo sapiens; identical to SEQ ID NO: 2370

SEQ ID NO: 3150 - DNA, 40 bp, Homo sapiens; identical to SEQ ID NO: 2408

SEQ ID NO: 3151 - DNA, 40 bp, Homo sapiens
ctgtagatactttctccctgagcccctcctgcccccctgc

SEQ ID NO: 3152 - DNA, 40 bp, Homo sapiens; identical to SEQ ID NO: 2287

SEQ ID NO: 3153 - DNA, 40 bp, Homo sapiens
gtttatttgaatgtgtgatggggaggtcatcaaaatgaac

SEQ ID NO: 3154 - DNA, 40 bp, Homo sapiens
ctccagttgggggtggggagttgggaacagtgtgaatggg

SEQ ID NO: 3155 - DNA, 40 bp, Homo sapiens; identical to SEQ ID NO: 2377

SEQ ID NO: 3156 - DNA, 40 bp, Homo sapiens; identical to SEQ ID NO: 2958

SEQ ID NO: 3157 - DNA, 40 bp, Homo sapiens; identical to SEQ ID NO: 2715

SEQ ID NO: 3158 - DNA, 40 bp, Homo sapiens; identical to SEQ ID NO: 2290

SEQ ID NO: 3159 - DNA, 40 bp, Homo sapiens; identical to SEQ ID NO: 2414

SEQ ID NO: 3160 - DNA, 40 bp, Homo sapiens; identical to SEQ ID NO: 2381

SEQ ID NO: 3161 - DNA, 40 bp, Homo sapiens; identical to SEQ ID NO: 2607

SEQ ID NO: 3162 - DNA, 40 bp, Homo sapiens; identical to SEQ ID NO: 2608

SEQ ID NO: 3163 - DNA, 40 bp, Homo sapiens; identical to SEQ ID NO: 2407

SEQ ID NO: 3164 - DNA, 40 bp, Homo sapiens; identical to SEQ ID NO: 2325

SEQ ID NO: 3165 - DNA, 40 bp, Homo sapiens; identical to SEQ ID NO: 2888

SEQ ID NO: 3166 - DNA, 40 bp, Homo sapiens; identical to SEQ ID NO: 2384

SEQ ID NO: 3167 - DNA, 40 bp, Homo sapiens; identical to SEQ ID NO: 2451

SEQ ID NO: 3168 - DNA, 40 bp, Homo sapiens; identical to SEQ ID NO: 2966

SEQ ID NO: 3169 - DNA, 40 bp, Homo sapiens; identical to SEQ ID NO: 2386

SEQ ID NO: 3170 - DNA, 40 bp, Homo sapiens; identical to SEQ ID NO: 2735

SEQ ID NO: 3171 - DNA, 40 bp, Homo sapiens; identical to SEQ ID NO: 2390

SEQ ID NO: 3172 - DNA, 40 bp, Homo sapiens; identical to SEQ ID NO: 2391

SEQ ID NO: 3173 - DNA, 40 bp, Homo sapiens; identical to SEQ ID NO: 2300

SEQ ID NO: 3174 - DNA, 40 bp, Homo sapiens; identical to SEQ ID NO: 2341

SEQ ID NO: 3175 - DNA, 40 bp, Homo sapiens; identical to SEQ ID NO: 2342

SEQ ID NO: 3176 - DNA, 40 bp, Homo sapiens; identical to SEQ ID NO: 2301

SEQ ID NO: 3177 - DNA, 40 bp, Homo sapiens; identical to SEQ ID NO: 2302

SEQ ID NO: 3178 - DNA, 40 bp, Homo sapiens; identical to SEQ ID NO: 2393

SEQ ID NO: 3179 - DNA, 40 bp, Homo sapiens; identical to SEQ ID NO: 2394

SEQ ID NO: 3180 - DNA, 40 bp, Homo sapiens; identical to SEQ ID NO: 2413

SEQ ID NO: 3181 - DNA, 40 bp, Homo sapiens; identical to SEQ ID NO: 2715

SEQ ID NO: 3182 - DNA, 40 bp, Homo sapiens; identical to SEQ ID NO: 2414

SEQ ID NO: 3183 - DNA, 40 bp, Homo sapiens; identical to SEQ ID NO: 2325

SEQ ID NO: 3184 - DNA, 40 bp, Homo sapiens; identical to SEQ ID NO: 2384

SEQ ID NO: 3185 - DNA, 40 bp, Homo sapiens; identical to SEQ ID NO: 2472

SEQ ID NO: 3186 - DNA, 40 bp, Homo sapiens; identical to SEQ ID NO: 2386

SEQ ID NO: 3187 - DNA, 40 bp, Homo sapiens; identical to SEQ ID NO: 2390

SEQ ID NO: 3188 - DNA, 40 bp, Homo sapiens; identical to SEQ ID NO: 2391

SEQ ID NO: 3189 - DNA, 40 bp, Homo sapiens; identical to SEQ ID NO: 2300

SEQ ID NO: 3190 - DNA, 40 bp, Homo sapiens; identical to SEQ ID NO: 2342

SEQ ID NO: 3191 - DNA, 40 bp, Homo sapiens; identical to SEQ ID NO: 2302

SEQ ID NO: 3192 - DNA, 40 bp, Homo sapiens; identical to SEQ ID NO: 2393

SEQ ID NO: 3193 - DNA, 40 bp, Homo sapiens; identical to SEQ ID NO: 2394

SEQ ID NO: 3194 - DNA, 40 bp, Homo sapiens; identical to SEQ ID NO: 2377

SEQ ID NO: 3195 - DNA, 40 bp, Homo sapiens; identical to SEQ ID NO: 2412

SEQ ID NO: 3196 - DNA, 40 bp, Homo sapiens; identical to SEQ ID NO: 2430

SEQ ID NO: 3197 - DNA, 40 bp, Homo sapiens; identical to SEQ ID NO: 2877

SEQ ID NO: 3198 - DNA, 40 bp, Homo sapiens; identical to SEQ ID NO: 2486

SEQ ID NO: 3199 - DNA, 40 bp, Homo sapiens; identical to SEQ ID NO: 2413

SEQ ID NO: 3200 - DNA, 40 bp, Homo sapiens; identical to SEQ ID NO: 2391

SEQ ID NO: 3201 - DNA, 40 bp, Homo sapiens; identical to SEQ ID NO: 2414

SEQ ID NO: 3202 - DNA, 40 bp, Homo sapiens; identical to SEQ ID NO: 2882

SEQ ID NO: 3203 - DNA, 40 bp, Homo sapiens; identical to SEQ ID NO: 2572

SEQ ID NO: 3204 - DNA, 40 bp, Homo sapiens; identical to SEQ ID NO: 2381

SEQ ID NO: 3205 - DNA, 40 bp, Homo sapiens; identical to SEQ ID NO: 2607

SEQ ID NO: 3206 - DNA, 40 bp, Homo sapiens; identical to SEQ ID NO: 2506

SEQ ID NO: 3207 - DNA, 40 bp, Homo sapiens; identical to SEQ ID NO: 2382

SEQ ID NO: 3208 - DNA, 40 bp, Homo sapiens; identical to SEQ ID NO: 2888

SEQ ID NO: 3209 - DNA, 40 bp, Homo sapiens; identical to SEQ ID NO: 2383

SEQ ID NO: 3210 - DNA, 40 bp, Homo sapiens; identical to SEQ ID NO: 2384

SEQ ID NO: 3211 - DNA, 40 bp, Homo sapiens; identical to SEQ ID NO: 2524

SEQ ID NO: 3212 - DNA, 40 bp, Homo sapiens; identical to SEQ ID NO: 2525

SEQ ID NO: 3213 - DNA, 40 bp, Homo sapiens; identical to SEQ ID NO: 2893

SEQ ID NO: 3214 - DNA, 40 bp, Homo sapiens; identical to SEQ ID NO: 2332

SEQ ID NO: 3215 - DNA, 40 bp, Homo sapiens; identical to SEQ ID NO: 2386

SEQ ID NO: 3216 - DNA, 40 bp, Homo sapiens; identical to SEQ ID NO: 2692

SEQ ID NO: 3217 - DNA, 40 bp, Homo sapiens; identical to SEQ ID NO: 2897

SEQ ID NO: 3218 - DNA, 40 bp, Homo sapiens; identical to SEQ ID NO: 2298

SEQ ID NO: 3219 - DNA, 40 bp, Homo sapiens; identical to SEQ ID NO: 2899

SEQ ID NO: 3220 - DNA, 40 bp, Homo sapiens; identical to SEQ ID NO: 2900

SEQ ID NO: 3221 - DNA, 40 bp, Homo sapiens; identical to SEQ ID NO: 2901

SEQ ID NO: 3222 - DNA, 40 bp, Homo sapiens; identical to SEQ ID NO: 2389

SEQ ID NO: 3223 - DNA, 40 bp, Homo sapiens; identical to SEQ ID NO: 2390

SEQ ID NO: 3224 - DNA, 40 bp, Homo sapiens; identical to SEQ ID NO: 2391

SEQ ID NO: 3225 - DNA, 40 bp, Homo sapiens; identical to SEQ ID NO: 2544

SEQ ID NO: 3226 - DNA, 40 bp, Homo sapiens; identical to SEQ ID NO: 2300

SEQ ID NO: 3227 - DNA, 40 bp, Homo sapiens; identical to SEQ ID NO: 2393

SEQ ID NO: 3228 - DNA, 40 bp, Homo sapiens; identical to SEQ ID NO: 2394

SEQ ID NO: 3229 - DNA, 40 bp, Homo sapiens; identical to SEQ ID NO: 2711

SEQ ID NO: 3230 - DNA, 40 bp, Homo sapiens; identical to SEQ ID NO: 2321

SEQ ID NO: 3231 - DNA, 40 bp, Homo sapiens; identical to SEQ ID NO: 2290

SEQ ID NO: 3232 - DNA, 40 bp, Homo sapiens; identical to SEQ ID NO: 2306

SEQ ID NO: 3233 - DNA, 40 bp, Homo sapiens; identical to SEQ ID NO: 2295

SEQ ID NO: 3234 - DNA, 40 bp, Homo sapiens; identical to SEQ ID NO: 2447

SEQ ID NO: 3235 - DNA, 40 bp, Homo sapiens; identical to SEQ ID NO: 2785

SEQ ID NO: 3236 - DNA, 40 bp, Homo sapiens; identical to SEQ ID NO: 2296

SEQ ID NO: 3237 - DNA, 40 bp, Homo sapiens; identical to SEQ ID NO: 2299

SEQ ID NO: 3238 - DNA, 40 bp, Homo sapiens; identical to SEQ ID NO: 2300

SEQ ID NO: 3239 - DNA, 40 bp, Homo sapiens; identical to SEQ ID NO: 2341

SEQ ID NO: 3240 - DNA, 40 bp, Homo sapiens; identical to SEQ ID NO: 2301

SEQ ID NO: 3241 - DNA, 40 bp, Homo sapiens; identical to SEQ ID NO: 2302

SEQ ID NO: 3242 - DNA, 40 bp, Homo sapiens; identical to SEQ ID NO: 2386

SEQ ID NO: 3243 - DNA, 40 bp, Homo sapiens; identical to SEQ ID NO: 2283

SEQ ID NO: 3244 - DNA, 40 bp, Homo sapiens; identical to SEQ ID NO: 2390

SEQ ID NO: 3245 - DNA, 40 bp, Homo sapiens; identical to SEQ ID NO: 2287

SEQ ID NO: 3246 - DNA, 40 bp, Homo sapiens; identical to SEQ ID NO: 2300

SEQ ID NO: 3247 - DNA, 40 bp, Homo sapiens; identical to SEQ ID NO: 2771

SEQ ID NO: 3248 - DNA, 40 bp, Homo sapiens; identical to SEQ ID NO: 2772

SEQ ID NO: 3249 - DNA, 40 bp, Homo sapiens; identical to SEQ ID NO: 2773

SEQ ID NO: 3250 - DNA, 40 bp, Homo sapiens; identical to SEQ ID NO: 2774

SEQ ID NO: 3251 - DNA, 40 bp, Homo sapiens; identical to SEQ ID NO: 2775

SEQ ID NO: 3252 - DNA, 40 bp, Homo sapiens; identical to SEQ ID NO: 2333

SEQ ID NO: 3253 - DNA, 40 bp, Homo sapiens; identical to SEQ ID NO: 2777

SEQ ID NO: 3254 - DNA, 40 bp, Homo sapiens; identical to SEQ ID NO: 2778

SEQ ID NO: 3255 - DNA, 40 bp, Homo sapiens; identical to SEQ ID NO: 2779

SEQ ID NO: 3256 - DNA, 40 bp, Homo sapiens; identical to SEQ ID NO: 2447

SEQ ID NO: 3257 - DNA, 40 bp, Homo sapiens; identical to SEQ ID NO: 2781

SEQ ID NO: 3258 - DNA, 40 bp, Homo sapiens; identical to SEQ ID NO: 2765

SEQ ID NO: 3259 - DNA, 40 bp, Homo sapiens; identical to SEQ ID NO: 2783

SEQ ID NO: 3260 - DNA, 40 bp, Homo sapiens; identical to SEQ ID NO: 2784

SEQ ID NO: 3261 - DNA, 40 bp, Homo sapiens; identical to SEQ ID NO: 2785

SEQ ID NO: 3262 - DNA, 40 bp, Homo sapiens; identical to SEQ ID NO: 2326

SEQ ID NO: 3263 - DNA, 40 bp, Homo sapiens; identical to SEQ ID NO: 2330

SEQ ID NO: 3264 - DNA, 40 bp, Homo sapiens; identical to SEQ ID NO: 2331

SEQ ID NO: 3265 - DNA, 40 bp, Homo sapiens; identical to SEQ ID NO: 2333

SEQ ID NO: 3266 - DNA, 40 bp, Homo sapiens; identical to SEQ ID NO: 2588

SEQ ID NO: 3267 - DNA, 40 bp, Homo sapiens; identical to SEQ ID NO: 2285

SEQ ID NO: 3268 - DNA, 40 bp, Homo sapiens; identical to SEQ ID NO: 2475

SEQ ID NO: 3269 - DNA, 40 bp, Homo sapiens; identical to SEQ ID NO: 2793

SEQ ID NO: 3270 - DNA, 40 bp, Homo sapiens; identical to SEQ ID NO: 2772

SEQ ID NO: 3271 - DNA, 40 bp, Homo sapiens; identical to SEQ ID NO: 2300

SEQ ID NO: 3272 - DNA, 40 bp, Homo sapiens; identical to SEQ ID NO: 2598

SEQ ID NO: 3273 - DNA, 40 bp, Homo sapiens; identical to SEQ ID NO: 2377

SEQ ID NO: 3274 - DNA, 40 bp, Homo sapiens; identical to SEQ ID NO: 2718

SEQ ID NO: 3275 - DNA, 40 bp, Homo sapiens
ggatttaatgagaaatattgagccctttggttcaggaact

SEQ ID NO: 3276 - DNA, 40 bp, Homo sapiens
gctctgttgtgataaattggctgtgtgcttcatttggact

SEQ ID NO: 3277 - DNA, 40 bp, Homo sapiens; identical to SEQ ID NO: 2381

SEQ ID NO: 3278 - DNA, 40 bp, Homo sapiens; identical to SEQ ID NO: 2306

SEQ ID NO: 3279 - DNA, 40 bp, Homo sapiens; identical to SEQ ID NO: 2607

SEQ ID NO: 3280 - DNA, 40 bp, Homo sapiens; identical to SEQ ID NO: 2608

SEQ ID NO: 3281 - DNA, 40 bp, Homo sapiens; identical to SEQ ID NO: 2398

SEQ ID NO: 3282 - DNA, 40 bp, Homo sapiens; identical to SEQ ID NO: 2451

SEQ ID NO: 3283 - DNA, 40 bp, Homo sapiens
gaaaagaacatgcatcctttcagagggttactctttgaga

SEQ ID NO: 3284 - DNA, 40 bp, Homo sapiens; identical to SEQ ID NO: 2589

SEQ ID NO: 3285 - DNA, 40 bp, Homo sapiens
gagcatcagtatgtagtgcaatcagtcaggagaaaatgag

SEQ ID NO: 3286 - DNA, 40 bp, Homo sapiens
cctcttcaatggatttggtccccttcaaccagctgtagct

SEQ ID NO: 3287 - DNA, 40 bp, Homo sapiens; identical to SEQ ID NO: 2772

SEQ ID NO: 3288 - DNA, 40 bp, Homo sapiens; identical to SEQ ID NO: 2300

SEQ ID NO: 3289 - DNA, 40 bp, Homo sapiens; identical to SEQ ID NO: 2427

SEQ ID NO: 3290 - DNA, 40 bp, Homo sapiens; identical to SEQ ID NO: 2301

SEQ ID NO: 3291 - DNA, 40 bp, Homo sapiens; identical to SEQ ID NO: 2393

SEQ ID NO: 3292 - DNA, 40 bp, Homo sapiens; identical to SEQ ID NO: 2394

SEQ ID NO: 3293 - DNA, 40 bp, Homo sapiens; identical to SEQ ID NO: 2453

SEQ ID NO: 3294 - DNA, 40 bp, Homo sapiens; identical to SEQ ID NO: 2377

SEQ ID NO: 3295 - DNA, 40 bp, Homo sapiens
aaaatcagctttaattaatttgagtgccagctctgtgtat

SEQ ID NO: 3296 - DNA, 40 bp, Homo sapiens; identical to SEQ ID NO: 2771

SEQ ID NO: 3297 - DNA, 40 bp, Homo sapiens; identical to SEQ ID NO: 2772

SEQ ID NO: 3298 - DNA, 40 bp, Homo sapiens; identical to SEQ ID NO: 2305

SEQ ID NO: 3299 - DNA, 40 bp, Homo sapiens; identical to SEQ ID NO: 2607

SEQ ID NO: 3300 - DNA, 40 bp, Homo sapiens; identical to SEQ ID NO: 2608

SEQ ID NO: 3301 - DNA, 40 bp, Homo sapiens; identical to SEQ ID NO: 2784

SEQ ID NO: 3302 - DNA, 40 bp, Homo sapiens; identical to SEQ ID NO: 2441

SEQ ID NO: 3303 - DNA, 40 bp, Homo sapiens; identical to SEQ ID NO: 2386

SEQ ID NO: 3304 - DNA, 40 bp, Homo sapiens
gatctggcctaaagaggtatagggcatgggaagatggagc

SEQ ID NO: 3305 - DNA, 40 bp, Homo sapiens; identical to SEQ ID NO: 2283

SEQ ID NO: 3306 - DNA, 40 bp, Homo sapiens; identical to SEQ ID NO: 2390

SEQ ID NO: 3307 - DNA, 40 bp, Homo sapiens; identical to SEQ ID NO: 2391

SEQ ID NO: 3308 - DNA, 40 bp, Homo sapiens; identical to SEQ ID NO: 2300

SEQ ID NO: 3309 - DNA, 40 bp, Homo sapiens; identical to SEQ ID NO: 2301

SEQ ID NO: 3310 - DNA, 40 bp, Homo sapiens; identical to SEQ ID NO: 2393

SEQ ID NO: 3311 - DNA, 40 bp, Homo sapiens; identical to SEQ ID NO: 2290

SEQ ID NO: 3312 - DNA, 40 bp, Homo sapiens; identical to SEQ ID NO: 2728

SEQ ID NO: 3313 - DNA, 40 bp, Homo sapiens; identical to SEQ ID NO: 2296

SEQ ID NO: 3314 - DNA, 40 bp, Homo sapiens; identical to SEQ ID NO: 2448

SEQ ID NO: 3315 - DNA, 40 bp, Homo sapiens; identical to SEQ ID NO: 2703

SEQ ID NO: 3316 - DNA, 40 bp, Homo sapiens
gaagaaacatctcaaatcatgctgacagcattttcactat

SEQ ID NO: 3317 - DNA, 40 bp, Homo sapiens
ttattgcttgaatgagtttcagggtattggccttcataaa

SEQ ID NO: 3318 - DNA, 40 bp, Homo sapiens; identical to SEQ ID NO: 2558

SEQ ID NO: 3319 - DNA, 40 bp, Homo sapiens; identical to SEQ ID NO: 2302

SEQ ID NO: 3320 - DNA, 40 bp, Homo sapiens; identical to SEQ ID NO: 2410

SEQ ID NO: 3321 - DNA, 40 bp, Homo sapiens; identical to SEQ ID NO: 2290

SEQ ID NO: 3322 - DNA, 40 bp, Homo sapiens; identical to SEQ ID NO: 2389

SEQ ID NO: 3323 - DNA, 40 bp, Homo sapiens; identical to SEQ ID NO: 2299

SEQ ID NO: 3324 - DNA, 40 bp, Homo sapiens; identical to SEQ ID NO: 2300

SEQ ID NO: 3325 - DNA, 40 bp, Homo sapiens; identical to SEQ ID NO: 2405

SEQ ID NO: 3326 - DNA, 40 bp, Homo sapiens
ttcctctcagagcatgttgtcatagaagtaaatgaaaagg

SEQ ID NO: 3327 - DNA, 40 bp, Homo sapiens
ctctcctgcacataatgaggtctgatttactgtgatcatt

SEQ ID NO: 3328 - DNA, 40 bp, Homo sapiens
attaatggtaattatgtgcgtaaatccccatgctctcaat

SEQ ID NO: 3329 - DNA, 40 bp, Homo sapiens
gagccgtttaaatttagcgctttgggctgcctggagcgag

SEQ ID NO: 3330 - DNA, 40 bp, Homo sapiens
gcaggggatttgaggggtggttgtgtgatttgtacagctg

SEQ ID NO: 3331 - DNA, 40 bp, Homo sapiens
cttctcagagttggagatgaaagaaagagaaggtggccac

SEQ ID NO: 3332 - DNA, 40 bp, Homo sapiens
ccttggagtaaagtagcagcacataatggtttgtggattt

SEQ ID NO: 3333 - DNA, 40 bp, Homo sapiens
aatgctatggaatgtaaagaagtatgtatttttggtaggc

SEQ ID NO: 3334 - DNA, 40 bp, Homo sapiens; identical to SEQ ID NO: 2292

SEQ ID NO: 3335 - DNA, 40 bp, Homo sapiens
ccagctcgggcagccgtggccatcttactgggcagcattg

SEQ ID NO: 3336 - DNA, 40 bp, Homo sapiens
aatgattgtagaggggcggggcatgaagagtgccgttctg

SEQ ID NO: 3337 - DNA, 40 bp, Homo sapiens; identical to SEQ ID NO: 2578

What is claimed is:

1. A method of determining sensitivity of a cancer patient to a treatment for cancer comprising measuring a level of expression of at least one gene in a cell of said patient, said gene selected from the group consisting of ACTB, ACTN4, ADA, ADAM9, ADAMTS1, ADD1, AF1Q, AIF1, AKAP1, AKAP13, AKR1C1, AKT1, ALDH2, ALDOC, ALG5, ALMS1, ALOX15B, AMIGO2, AMPD2, AMPD3, ANAPC5, ANP32A, ANP32B, ANXA1, AP1G2, APOBEC3B, APRT, ARHE, ARHGAP15, ARHGAP25, ARHGDIB, ARHGEF6, ARL7, ASAH1, ASPH, ATF3, ATIC, ATP2A2, ATP2A3, ATP5D, ATP5G2, ATP6V1B2, BC008967, BCAT1, BCHE, BCL11B, BDNF, BHLHB2, BIN2, BLMH, BMI1, BNIP3, BRDT, BRRN1, BTN3A3, C11orf2, C14orf139, C15orf25, C18orf10, C1orf24, C1orf29, C1orf18, C1QR1, C22orf18, C6 orf2, CACNA1G, CACNB3, CALM1, CALML4, CALU, CAP350, CASP2, CASP6, CASP7, CAST, CBLB, CCNA2, CCNB1IP1, CCND3, CCR7, CCR9, CD1A, CD1C, CD1D, CD1E, CD2, CD28, CD3D, CD3E, CD3G, CD3Z, CD44, CD47, CD59, CD6, CD63, CD8A, CD8B1, CD99, CDC10, CDCl₄B, CDH11, CDH2, CDKL5, CDKN2A, CDW52, CECR1, CENPB, CENTB1, CENTG2, CEP1, CG018, CHRNA3, CHS1, CIAPIN1, CKAP4, CKIP-1, CNP, COL4A1, COL5A2, COL6A1, CORO1C, CRABP1, CRK, CRY1, CSDA, CTBP1, CTSC, CTSL, CUGBP2, CUTC, CXCL1, CXCR4, CXorf9, CYFIP2, CYLD, CYR61, DATF1, DAZAP1, DBN1, DBT, DCTN1, DDX18, DDX5, DGKA, DIAPH1, DKC1, DKFZP434J154, DKFZP564C186, DKFZP564G2022, DKFZp564J157, DKFZP564K0822, DNAJC10, DNAJC7, DNAPTP6, DOCK10, DOCK2, DPAGT1, DPEP2, DPYSL3, DSIPI, DUSP1, DXS9879E, EEF1B2, EFNB2, EHD2, EIF5A, ELK3, ENO2, EPAS1, EPB41L4B, ERCC2, ERG, ERP70, EVER1, EVI2A, EVL, EXT1, EZH2, F2R, FABP5, FAD104, FAM46A, FAU, FCGR2A, FCGR2C, FER1L3, FHL1, FHOD1, FKBP1A, FKBP9, FLJ10350, FLJ10539, FLJ10774, FLJ12270, FLJ13373, FLJ20859, FLJ21159, FLJ22457, FLJ35036, FLJ46603, FLNC, FLOT1, FMNL1, FNBP1, FOLH1, FOXF2, FSCN1, FTL, FYB, FYN, GOS2, G6PD, GALIG, GALNT6, GATA2, GATA3, GFPT1, GIMAP5, GIT2, GJA1, GLRB, GLTSCR2, GLUL, GMDS, GNAQ, GNB2, GNB5, GOT2, GPR65, GPRASP1, GPSM3, GRP58, GSTM2, GTF3A, GTSE1, GZMA, GZMB, H1F0, H1FX, H2AFX, H3F3A, HA-1, HEXB, HIC, HIST1H4C, HK1, HLA-A, HLA-B, HLA-DRA, HMGA1, HMGN2, HMMR, HNRPA1, HNRPD, HNRPM, HOXA9, HRMT1L1, HSA9761, HSPA5, HSU79274, HTATSF1, ICAM1, ICAM2, IER3, IFI16, IFI44, IFITM2, IFITM3, IFRG28, IGFBP2, IGSF4, IL13RA2, IL21R, IL2RG, IL4R, IL6, IL6R, IL6ST, IL8, IMPDH2, INPP5D, INSIG1, IQGAP1, IQGAP2, IRS2, ITGA5, ITM2A, JARID2, JUNB, K-ALPHA-1, KHDRBS1, KIAA0355, KIAA0802, KIAA0877, KIAA0922, KIAA1078, KIAA1128, KIAA1393, KIFC1, LAIR1, LAMB1, LAMB3, LAT, LBR, LCK, LCP1, LCP2, LEF1, LEPRE1, LGALS1, LGALS9, LHFPL2, LNK, LOC54103, LOC55831, LOC81558, LOC94105, LONP, LOX, LOXL2, LPHN2, LPXN, LRMP, LRP12, LRRC5, LRRN3, LST1, LTB, LUM, LY9, LY96, MAGEB2, MAL, MAP1B, MAP1LC3B, MAP4K1, MAPK1, MARCKS, MAZ, MCAM, MCL1, MCM5, MCM7, MDH2, MDN1, MEF2C, MFNG, MGC17330, MGC21654, MGC2744, MGC4083, MGC8721, MGC8902, MGLL, MLPH, MPHOSPH6, MPP1, MPZL1, MRP63, MRPS2, MT1E, MT1K, MUF1, MVP, MYB, MYL9, MYO1B, NAP1L1, NAP1L2, NARF, NASP, NCOR2, NDN, NDUFAB1, NDUFS6, NFKBIA, NID2, NIPA2, NME4, NME7, NNMT, NOL5A, NOL8, NOMO2, NOTCH1, NPC1, NQO1, NR1D2, NUDC, NUP210, NUP88, NVL, NXF1, OBFC1, OCRL, OGT, OXA1L, P2RX5, P4HA1, PACAP, PAF53, PAFAH1B3, PALM2-AKAP2, PAX6, PCBP2, PCCB, PFDN5, PFN1, PFN2, PGAM1, PHEMX, PHLDA1, PIM2, PITPNC1, PLAC8, PLAGL1, PLAUR, PLCB1, PLEK2, PLEKHC1, PLOD2, PLSCR1, PNAS-4, PNMA2, POLR2F, PPAP2B, PRF1, PRG1, PRIM1, PRKCH, PRKCQ, PRKD2, PRNP, PRP19, PRPF8, PRSS23, PSCDBP, PSMB9, PSMC3, PSME2, PTGER4, PTGES2, PTOV1, PTP4A3, PTPN7, PTPNS1, PTRF, PURA, PWP1, PYGL, QKI, RAB3GAP, RAB7L1, RAB9P40, RAC2, RAFTLIN, RAG2, RAP1B, RASGRP2, RBPMS, RCN1, RFC3, RFC5, RGC32, RGS3, RHOH, RIMS3, RIOK3, RIPK2, RIS1, RNASE6, RNF144, RPL10, RPL10A, RPL12, RPL13A, RPL17, RPL18, RPL36A, RPLP0, RPLP2, RPS15, RPS19, RPS2, RPS4X, RPS4Y1, RRAS, RRAS2, RRBP1, RRM2, RUNX1, RUNX3, S100A4, SART3, SATB1, SCAP1, SCARB1, SCN3A, SEC31L2, SEC61G, SELL, SELPLG, SEMA4G, SEPT10, SEPT6, SERPINA1, SERPINB1, SERPINB6, SFRS5, SFRS6, SFRS7, SH2D1A, SH3GL3, SH3TC1, SHD1, SHMT2, SIAT1, SKB1, SKP2, SLA, SLC1A4, SLC20A1, SLC25A15, SLC25A5, SLC39A14, SLC39A6, SLC43A3, SLC4A2, SLC7A11, SLC7A6, SMAD3, SMOX, SNRPA, SNRPB, SOD2, SOX4, SP140, SPANXC, SPI1, SRF, SRM, SSA2, SSBP2, SSRP1, SSSCA1, STAG3, STAT1, STAT4, STAT5A, STC1, STC2, STOML2, T3JAM, TACC1, TACC3, TAF5, TAL1, TAP1, TARP, TBCA, TCF12, TCF4, TFDP2, TFPI, TIMM17A, TIMP1, TJP1, TK2, TM4SF1, TM4SF2, TM4SF8, TM6SF1, TMEM2, TMEM22, TMSB10, TMSNB, TNFAIP3, TNFAIP8, TNFRSF10B, TNFRSF1A, TNFRSF7, TNIK, TNPO1, TOB1, TOMM20, TOX, TPK1, TPM2, TRA@, TRA1, TRAM2, TRB@, TRD@, TRIM, TRIM14, TRIM22, TRIM28, TRIP13, TRPV2, TUBGCP3, TUSC3, TXN, TXNDC5, UBASH3A, UBE2A, UBE2L6, UBE2S, UCHL1, UCK2, UCP2, UFD1L, UGDH, ULK2, UMPS, UNG, USP34, USP4, VASP, VAV1, VLDLR, VWF, WASPIP, WBSCR20A, WBSCR20C, WHSC1, WNT5A, ZAP70, ZFP36L1, ZNF32, ZNF335, ZNF593, ZNFN1A1, and ZYX, wherein said level of expression of said gene indicates said cell is sensitive to said treatment.

2. The method of claim 1, wherein said at least one gene is selected from the group consisting of RPS4X, S100A4, NDUFS6, C14orf139, SLC25A5, RPL10, RPL12, EIF5A, RPL36A, BLMH, CTBP1, TBCA, MDH2, and DXS9879E, or wherein the method further comprises measuring a level of expression of at least one gene selected from the group consisting of UBB, B2M, MAN1A1, and SUI1, or wherein the method further comprises measuring a level of at least one microRNA selected from the group consisting of Hcd892, Hcd678, hsa-mir-007-1-prec, MPR243, Hcd654, hsa-mir-487, Hcd794, Hcd739, and Hcd562, wherein said level of expression of said gene or said level of said microRNA indicates that said cell is sensitive to Vincristine.

3. The method of claim 1, wherein said at least one gene is selected from the group consisting of C1 QR1, SLA, PTPN7, ZNFN1A1, CENTB1, IFI16, ARHGEF6, SEC31L2, CD3Z, GZMB, CD3D, MAP4K1, GPR65, PRF1, ARHGAP15, TM6SF1, and TCF4, or wherein the method further comprises measuring a level of expression of at least one gene selected from the group consisting of HCLS1, CD53, PTPRCAP, and PTPRC, or wherein the method further comprises measuring a level of expression of at least one microRNA selected from the group consisting of HUMTRF, HPR187, hsa-mir-450-1, hsa-mir-155-prec, hsa-mir-515-15p, hsa-mir-181b-prec, hsa-mir-124a-1-prec1, hsa-mir-450-2, Hcd923, hsa-mir-342, hsa-mir-142-prec, hsa-mir-223-prec, Hcd754, and Hcd213_HPR182, wherein said level of expression of said gene or microRNA indicates that said cell is sensitive to Cisplatin.

4. The method of claim 1, wherein said at least one gene is selected from the group consisting of SRM, SCARB1, SIAT1, CUGBP2, ICAM1, WASPIP, ITM2A, PALM2-AKAP2, PTPNS1, MPP1, LNK, FCGR2A, RUNX3, EVI2A, BTN3A3, LCP2, BCHE, LY96, LCP1, IFI16, MCAM, MEF2C, SLC1A4, FYN, C1orf38, CHS1, FCGR2C, TNIK, AMPD2, SEPT6, RAFTLIN, SLC43A3, RAC2, LPXN, CKIP-1, FLJ10539, FLJ35036, DOCK10, TRPV2, IFRG28, LEF1, and ADAMTS1, or wherein the method further comprises measuring a level of expression of at least one gene selected from the group consisting of MSN, SPARC, VIM, GAS7, ANPEP, EMP3, BTN3A2, FN1, and CAPN3, or wherein the method further comprises measuring a level of expression of at least one microRNA selected from the group consisting of MPR121, HUMTRS, hsa-mir-2,3-prec, hsa-mir-155-prec, hsa-mir-147-prec, hsa-mir-100, hsa-mir-138-1-prec, hsa-mir-140, hsa-mir-146-prec, hsa-mir-509, hsa-mir-146b, Hcd514, Hcd397, Hcd731, hsa-mir-034-prec, and hsa-mir-100-1/2-prec, wherein said level of expression of said gene or microRNA indicates that said cell is sensitive to Azaguanine.

5. The method of claim 1, wherein said at least one gene is selected from the group consisting of CD99, INSIG1, PRG1, MUF1, SLA, SSBP2, GNB5, MFNG, PSMB9, EVI2A, PTPN7, PTGER4, CXorf9, ZNFN1A1, CENTB1, NAP1L1, HLA-DRA, IFI16, ARHGEF6, PSCDBP, SELPLG, LAT, SEC31L2, CD3Z, SH2D1A, GZMB, SCN3A, RAFTLIN, DOCK2, CD3D, RAC2, ZAP70, GPR65, PRF1, ARHGAP15, NOTCH1, and UBASH3A, or wherein the method further comprises measuring a level of expression of at least one gene selected from the group consisting of LAPTM5, HCLS1, CD53, GMFG, PTPRCAP, PTPRC, CORO1A, and ITK, or wherein the method further comprises measuring a level of expression of at least one microRNA selected from the group consisting of Hcd415, Hcd768, HUMTRF, Hcd866, Hcd145, HUMTRAB, Hcd913, HPR163, Hcd697, Hcd755, Hcd716, MPR207, HSTRNL, HPR206, MPR243, Hcd654, MPR130, Hcd782, Hcd794, Hcd739, hsa-mir-142-prec, HSHELA01, HUMTRV1A, and Hcd754, wherein said level of expression of said gene or microRNA indicates that said cell is sensitive to Etoposide.

6. The method of claim 1, wherein said at least one gene is selected from the group consisting of CD99, ALDOC, SLA, SSBP2, IL2RG, CXorf9, RHOH, ZNFN1A1, CENTB1, CD1C, MAP4K1, CD3G, CCR9, CXCR4, ARHGEF6, SELPLG, LAT, SEC31L2, CD3Z, SH2D1A, CD1A, LAIR1, TRB@, CD3D, WBSCR20C, ZAP70, IFI44, GPR65, AIF1, ARHGAP15, NARF, and PACAP, or wherein the method further comprises measuring a level of expression of at least one gene selected from the group consisting of LAPTM5, HCLS1, CD53, GMFG, PTPRCAP, TCF7, CD1B, PTPRC, CORO1A, HEM1, and ITK, or wherein the method further comprises measuring a level of expression of at least one microRNA selected from the group consisting of Hcd768, hsa-mir-483, Hcd145, hsa-mir-197-prec, hsa-mir-2,2-prec, HPR163, Hcd654, hsa-mir-342, Hcd794, hsa-mir-142-prec, and Hcd754, wherein said level of expression of said gene or microRNA indicates that said cell is sensitive to Adriamycin.

7. The method of claim 1, wherein said at least one gene is selected from the group consisting of RPL12, RPLP2, MYB, ZNFN1A1, SCAP1, STAT4, SP140, AMPD3, TNFAIP8, DDX18, TAF5, RPS2, DOCK2, GPR65, HOXA9, FLJ12270, and HNRPD, or wherein the method further comprises measuring a level of expression of at least one gene selected from the group consisting of RPL32, FBL, and PTPRC, or wherein the method further comprises measuring a level of expression of at least one microRNA selected from the group consisting of hsa-mir-092-prec-X=092-2, hsa-mir-096-prec-7, Hcd605, hsa-mir-007-2-prec, hsa-mir-019b-2-prec, MPR216, hsa-mir-019b-1-prec, hsa-mir-135-2-prec, HSTRNL, hsa-mir-025-prec, hsa-mir-007-1-prec, hsa-mir-019a-prec, hsa-mir-380-5p, hsa-mir-093-prec-7.1=093-1, hsa-mir-106-prec-X, hsa-mir-142-prec, hsa-mir-018-prec, and hsa-mir-020-prec, wherein said level of expression of said gene or microRNA indicates that said cell is sensitive to Aclarubicin.

8. The method of claim 1, wherein said at least one gene is selected from the group consisting of PGAM1, DPYSL3, INSIG1, GJA1, BNIP3, PRG1, G6PD, PLOD2, LOXL2, SSBP2, C1orf29, TOX, STC1, TNFRSF1A, NCOR2, NAP1L1, LOC94105, ARHGEF6, GATA3, TFPI, LAT, CD3Z, AF1Q, MAP1B, TRIM22, CD3D, BCAT1, IFI44, CUTC, NAP1L2, NME7, FLJ21159, and COL5A2, or wherein the method further comprises measuring a level of expression of at least one gene selected from the group consisting of BASP1, COL6A2, PTPRC, PRKCA, CCL2, and RAB31, or wherein the method further comprises measuring a level of expression of at least one microRNA selected from the group consisting of Hcd768, HUMTRF, hsa-mir-2,3-prec, hsa-mir-181b-prec, MPR244, hsa-mir-409-3p, HSTRNL, hsa-mir-382, hsa-mir-342, hsa-mir-142-prec, and Hcd200, wherein said level of expression of said gene or microRNA indicates that said cell is sensitive to Mitoxantrone.

9. The method of claim 1, wherein said at least one gene is selected from the group consisting of STC1, GPR65, DOCK10, COL5A2, FAM46A, and LOC54103, or wherein the method further comprises measuring a level of expression of at least one microRNA selected from the group consisting of HUMTRF, Hcd148_HPR225left, Hcd938, MPR174, and hsa-mir-4323p, wherein said level of expression of said gene or microRNA indicates that said cell is sensitive to Mitomycin.

10. The method of claim 1, wherein said at least one gene is selected from the group consisting of RPL10, RPS4X, NUDC, DKC1, DKFZP564C186, PRP19, RAB9P40, HSA9761, GMDS, CEP1, IL13RA2, MAGEB2, HMGN2, ALMS1, GPR65, FLJ10774, NOL8, DAZAP1, SLC25A15, PAF53, DXS9879E, PITPNC1, SPANXC, and KIAA1393, or wherein the method further comprises measuring a level of expression of RALY, or wherein the method further comprises measuring a level of expression of at least one microRNA selected from the group consisting of hsa-mir-092-prec-X=092-2, hsa-mir-096-prec-7, hsa-mir-101-prec-9, hsa-mir-20b, hsa-mir-019b-2-prec, hsa-mir-032-prec, MPR156, hsa-mir-019b-1-prec, hsa-mir-135-2-prec, hsa-mir-025-prec, hsa-mir-007-1-prec, hsa-mir-361, hsa-mir-093-prec-7.1=093-1, hsa-mir-106-prec-X, hsa-mir-098-prec-X, hsa-mir-142-prec, HPR169, hsa-mir-018-prec, and hsa-mir-020-prec, wherein said level of expression of said gene or microRNA indicates that said cell is sensitive to Paclitaxel.

11. The method of claim 1, wherein said at least one gene is selected from the group consisting of PFN1, PGAM1, K-ALPHA-1, CSDA, UCHL1, PWP1, PALM2-AKAP2, TNFRSF1A, ATP5G2, AF1Q, NME4, and FHOD1, or wherein the method further comprises measuring a level of expression of at least one microRNA selected from the group consisting of hsa-mir-123-prec, Hcd257, hsa-mir-155-prec, ath-MIR180a, Hcd448, HSTRNL, MPR174, Hcd200, hsa-mir-4323p, and HPR244, wherein said level of expression of said gene or microRNA indicates that said cell is sensitive to Gemcitabine.

12. The method of claim 1, wherein said at least one gene is selected from the group consisting of ANP32B, GTF3A, RRM2, TRIM14, SKP2, TRIP13, RFC3, CASP7, TXN, MCM5, PTGES2, OBFC1, EPB41L4B, and CALML4, or wherein the method further comprises measuring a level of expression of at least one microRNA selected from the group consisting of hsa-mir-096-prec-7, hsa-mir-095-prec-4, HSTRNL, and hsa-mir-007-1-prec, wherein said level of expression of said gene or microRNA indicates that said cell is sensitive to Taxotere.

13. The method of claim 1, wherein said at least one gene is selected from the group consisting of IFITM2, UBE2L6, USP4, ITM2A, IL2RG, GPRASP1, PTPN7, CXorf9, RHOH, GIT2, ZNFN1A1, CEP1, TNFRSF7, MAP4K1, CCR7, CD3G, ATP2A3, UCP2, GATA3, CDKN2A, TARP, LAIR1, SH2D1A, SEPT6, HA-1, ERCC2, CD3D, LST1, AIF1, ADA, DATF1, ARHGAP15, PLAC8, CECR1, LOC81558, and EHD2, or wherein the method further comprises measuring a level of expression of at least one gene selected from the group consisting of LAPTM5, ITGB2, ANPEP, CD53, CD37, ADORA2A, GNA15, PTPRC, CORO1A, HEM1, FLII, and CREB3L1, or wherein the method further comprises measuring a level of expression of at least one microRNA selected from the group consisting of MPR141, hsa-mir-424, Hcd690, Hcd783, hsa-mir-150-prec, Hcd266, hsa-mir-503, hsa-mir-128b-prec, Hcd397, and hsa-mir-484, wherein said level of expression of said gene or microRNA indicates that said cell is sensitive to Dexamethasone.

14. The method of claim 1, wherein said at least one gene is selected from the group consisting of ITM2A, RHOH, PRIM1, CENTB1, NAP1L1, ATP5G2, GATA3, PRKCQ, SH2D1A, SEPT6, NME4, CD3D, CD1E, ADA, and FHOD1, or wherein the method further comprises measuring a level of expression of at least one gene selected from the group consisting of GNA15, PTPRC, and RPL13, or wherein the method further comprises measuring a level of expression of at least one microRNA selected from the group consisting of HUMTRF, hsa-mir-155-prec, hsa-mir-515-15p, Hcd938, Hcd642, Hcd120, hsa-mir-380-5p, hsa-mir-342, hsa-mir-142-prec, hsa-mir-223-prec, and hsa-mir-4323p, wherein said level of expression of said gene or microRNA indicates that said cell is sensitive to Ara-C.

15. The method of claim 1, wherein said at least one gene is selected from the group consisting of CD99, ARHGDIB, VWF, ITM2A, LGALS9, INPP5D, SATB1, TFDP2, SLA, IL2RG, MFNG, SELL, CDW52, LRMP, ICAM2, RIMS3, PTPN7, ARHGAP25, LCK, CXorf9, RHOH, GIT2, ZNFN1A1, CENTB1, LCP2, SPI1, GZMA, CEP1, CD8A, SCAP1, CD2, CD1C, TNFRSF7, VAV1, MAP4K1, CCR7, C6orf32, ALOX1SB, BRDT, CD3G, LTB, ATP2A3, NVL, RASGRP2, LCP1, CXCR4, PRKD2, GATA3, TRA@, KIAA0922, TARP, SEC31L2, PRKCQ, SH2D1A, CHRNA3, CD1A, LST1, LAIR1, CACNA1G, TRB@, SEPT6, HA-1, DOCK2, CD3D, TRD@, T3JAM, FNBP1, CD6, AIF1, FOLH1, CD1E, LY9, ADA, CDKL5, TRIM, EVL, DATF1, RGC32, PRKCH, ARHGAP15, NOTCH1, BIN2, SEMA4G, DPEP2, CECR1, BCL11B, STAG3, GALNT6, UBASH3A, PHEMX, FLJ13373, LEF1, IL21R, MGC17330, AKAP13, ZNF335, and GIMAP5, or wherein the method further comprises measuring a level of expression of at least one gene selected from the group consisting of SRRM1, LAPTM5, ITGB2, CD53, CD37, GMFG, PTPRCAP, GNA15, BLM, PTPRC, CORO1A, PRKCB1, HEM1, and UGT2B17, or wherein the method further comprises measuring a level of expression of at least one microRNA selected from the group consisting of Hcd544, hsa-mir-181c-prec, Hcd517, MPR151, hsa-mir-2,3-prec, hsa-mir-181b-prec, hsa-mir-150-prec, hsa-mir-153-1-prec1, hsa-mir-128 b-prec, Hcd812, hsa-mir-195-prec, hsa-mir-342, hsa-mir-370, hsa-mir-142-prec, hsa-mir-223-prec, and hsa-mir-484, wherein said level of expression of said gene or microRNA indicates that said cell is sensitive to Methylprednisolone.

16. The method of claim 1, wherein said at least one gene is selected from the group consisting of PRPF8, RPL18, GOT2, RPL13A, RPS15, RPLP2, CSDA, KHDRBS1, SNRPA, IMPDH2, RPS19, NUP88, ATP5D, PCBP2, ZNF593, HSU79274, PRIM1, PFDN5, OXA1L, H3F3A, ATIC, CIAPIN1, RPS2, PCCB, SHMT2, RPLP0, HNRPA1, STOML2, SKB1, GLTSCR2, CCNB1IP1, MRPS2, FLJ20859, and FLJ12270, or wherein the method further comprises measuring a level of expression of at least one gene selected from the group consisting of RNPS1, RPL32, EEF1G, PTMA, RPL13, FBL, RBMX, and RPS9, or wherein the method further comprises measuring a level of expression of at least one microRNA selected from the group consisting of hsa-mir-092-prec-X=092-2, hsa-mir-096-prec-7, hsa-mir-123-prec, Hcd250, hsa-mir-518e, HPR232, Hcd263, hsa-mir-516-33p, Hcd605, Hcd373, MPR254, MPR215, HUMTRF, hsa-mir-106a, hsa-mir-20b, Hcd361, Hcd412, Hcd781, hsa-mir-019b-2-prec, HPR214, Hcd807, Hcd817, Hcd788, Hcd970, Hcd148_HPR225left, Hcd102, Hcd246, HPR199, HPR233, Hcd383, MPR224, HPR172, MPR216, hsa-mir-321, Hcd586, Hcd587, Hcd249, Hcd279, HPR159, Hcd689, Hcd691, hsa-mir-019b-1-prec, Hcd413, Hcd581, Hcd536_HPR104, Hcd230, HPR154, Hcd270, Hcd649, Hcd889, Hcd938, HPR266, hsa-mir-025-prec, Hcd355_HPR190, MPR162, Hcd923, MPR237, MPR174, hsa-mir-019a-prec, hsa_mir_{—}490_Hcd20, hsa-mir-380-5p, hsa-mir-093-prec-7.1=093-1, hsa-mir-106-prec-X, Hcd627, hsa-mir-142-prec, HPR169, hsa-mir-001b-2-prec, hsa-mir-018-prec, hsa-mir-020-prec, Hcd404, hsa-mir-384, and hsa-mir-4323p, wherein said level of expression of said gene or microRNA indicates that said cell is sensitive to Methotrexate.

17. The method of claim 1, wherein said at least one gene is selected from the group consisting of PFN1, HK1, MCL1, ZYX, RAP1B, GNB2, EPAS1, PGAM1, CKAP4, DUSP1, MYL9, K-ALPHA-1, LGALS1, CSDA, IFITM2, ITGA5, DPYSL3, JUNB, NFKBIA, LAMB1, FHL1, INSIG1, TIMP1, GJA1, PSME2, PRG1, EXT1, DKFZP434J154, MVP, VASP, ARL7, NNMT, TAP1, PLOD2, ATF3, PALM2-AKAP2, IL8, LOXL2, IL4R, DGKA, STC2, SEC61G, RGS3, F2R, TPM2, PSMB9, LOX, STC1, PTGER4, IL6, SMAD3, WNT5A, BDNF, TNFRSF1A, FLNC, DKFZP564K0822, FLOT1, PTRF, HLA-B, MGC4083, TNFRSF10B, PLAGL1, PNMA2, TFPI, LAT, GZMB, CYR61, PLAUR, FSCN1, ERP70, AF1Q, HIC, COL6 μl, IFITM3, MAP1B, FLJ46603, RAFTLIN, RRAS, FTL, KIAA0877, MT1E, CDC10, DOCK2, TRIM22, RIS1, BCAT1, PRF1, DBN1, MT1K, TMSB10, FLJ10350, C1orf24, NME7, TMEM22, TPK1, COL5A2, ELK3, CYLD, ADAMTS1, EHD2, and ACTB, or wherein the method further comprises measuring a level of expression of at least one gene selected from the group consisting of MSN, ACTR2, AKR1B1, VIM, ITGA3, OPTN, M6PRBP1, COL1A1, BASP1, ANPEP, TGFB1, NFIL3, NK4, CSPG2, PLAU, COL6A2, UBC, FGFR1, BAX, COL4A2, and RAB31, or wherein the method further comprises measuring a level of expression of at least one microRNA selected from the group consisting of hsa-mir-376a, hsa-mir-155-prec, hsa-mir-409-3p, hsa-mir-495, Hcd498, hsa-mir-199a-2-prec, hsa-mir-382, HPR271, hsa-mir-145-prec, and hsa-mir-199a-1-prec, wherein said level of expression of said gene or microRNA indicates that said cell is sensitive to Bleomycin.

18. The method of claim 1, wherein said at least one gene is selected from the group consisting of SSRP1, NUDC, CTSC, AP1G2, PSME2, LBR, EFNB2, SERPINA1, SSSCA1, EZH2, MYB, PRIM1, H2AFX, HMGA1, HMMR, TK2, WHSC1, DIAPH1, LAMB3, DPAGT1, UCK2, SERPINB1, MDN1, BRRN1, GOS2, RAC2, MGC21654, GTSE1, TACC3, PLEK2, PLAC8, HNRPD, and PNAS-4, or wherein the method further comprises measuring the level of expression of PTMA, or wherein the method further comprises measuring a level of expression of at least one microRNA selected from the group consisting of hsa-mir-092-prec-X=092-2, hsa-mir-101-prec-9, hsa-mir-144-prec, hsa-mir-519a-1, hsa-mir-519b, hsa-mir-015b-prec, hsa-mir-106a, hsa-mir-16-1, hsa-mir-181d, hsa-mir-017-prec, hsa-mir-019b-2-prec, hsa-mir-192, hsa-mir-2,3-prec, hsa-mir-2,5-prec, hsa-mir-107, hsa-mir-200b, hsa-mir-103-prec-5=103-1, hsa-mir-519a-1/526c, MPR216, hsa-mir-019b-1-prec, hsa-mir-107-prec-10, hsa-mir-135-2-prec, hsa-mir-103-2-prec, hsa-mir-519a-2, hsa-mir-025-prec, hsa-mir-16-2, MPR95, hsa-mir-016b-chr3, Hcd948, hsa-mir-195-prec, hsa-mir-093-prec-7.1=093-1, hsa-mir-106-prec-X, hsa-mir-142-prec, hsa-mir-519c/526c, hsa-mir-200a-prec, hsa-mir-016a-chr13, hsa-mir-018-prec, and hsa-mir-020-prec, wherein said level of expression of said gene or microRNA indicates that said cell is sensitive to Methyl-GAG.

19. The method of claim 1, wherein said at least one gene is selected from the group consisting of ITGA5, TNFAIP3, WNT5A, FOXF2, LOC94105, IFI16, LRRN3, DOCK10, LEPRE1, COL5A2, and ADAMTS1, or wherein the method further comprises measuring a level of expression of at least one gene selected from the group consisting of MSN, VIM, CSPG2, and FGFR1, or wherein the method further comprises measuring a level of expression of at least one microRNA selected from the group consisting of Hcd829, HUMTRF, HPR187, Hcd210_HPR205, hsa-mir-379, hsa-mir-2,3-prec, hsa-mir-4325p, hsa-mir-450-1, hsa-mir-155-prec, Hcd28_HPR39right, MPR244, hsa-mir-409-3p, hsa-mir-124a-1-prec1, hsa-mir-154-prec1, hsa-mir-495, hsa-mir-515-23p, Hcd438right, Hcd770, hsa-mir-382, hsa-mir-223-prec, Hcd754, and Hcd213_HPR182, wherein said level of expression of said gene or microRNA indicates that said cell is sensitive to Carboplatin.

20. The method of claim 1, wherein said at least one gene is selected from the group consisting of RPL18, RPL10A, ANAPC5, EEF1B2, RPL13A, RPS15, AKAP1, NDUFAB1, APRT, ZNF593, MRP63, IL6R, SART3, UCK2, RPL17, RPS2, PCCB, TOMM20, SHMT2, RPLP0, GTF3A, STOML2, DKFZp564J157, MRPS2, ALG5, and CALML4, or wherein the method further comprises measuring a level of expression of at least one gene selected from the group consisting of RNPS1, RPL13, RPS6, and RPL3, or wherein the method further comprises measuring a level of expression of at least one microRNA selected from the group consisting of hsa-mir-096-prec-7, hsa-mir-429, Hcd693, HPR214, Hcd586, Hcd249, Hcd689, hsa-mir-194-2, Hcd581, Hcd270, hsa-mir-025-prec, Hcd340, hsa-mir-007-1-prec, hsa-mir-093-prec-7.1=093-1, hsa-mir-106-prec-X, Hcd794, hsa-mir-020-prec, and hsa-mir-4323p, wherein said level of expression of said gene or microRNA indicates that said cell is sensitive to 5-FU (5-Fluorouracil).

21. The method of claim 1, wherein said at least one gene is selected from the group consisting of KIFC1, VLDLR, RUNX1, PAFAH1B3, H1FX, RNF144, TMSNB, CRY1, MAZ, SLA, SRF, UMPS, CD3Z, PRKCQ, HNRPM, ZAP70, ADD1, RFC5, TM4SF2, PFN2, BMI1, TUBGCP3, ATP6V1B2, CD1D, ADA, CD99, CD2, CNP, ERG, CD3E, CD1A, PSMC3, RPS4Y1, AKT1, TAL1, UBE2A, TCF12, UBE2S, CCND3, PAX6, RAG2, GSTM2, SATB1, NASP, IGFBP2, CDH2, CRABP1, DBN1, AKR1C1, CACNB3, CASP2, CASP2, LCP2, CASP6, MYB, SFRS6, GLRB, NDN, GNAQ, TUSC3, GNAQ, JARID2, OCRL, FHL1, EZH2, SMOX, SLC4A2, UFD1L, ZNF32, HTATSF1, SHD1, PTOV1, NXF1, FYB, TRIM28, BC008967, TRB@, H1F0, CD3D, CD3G, CENPB, ALDH2, ANXA1, H2AFX, CD1E, DDX5, CCNA2, ENO2, SNRPB, GATA3, RRM2, GLUL, SOX4, MAL, UNG, ARHGDIB, RUNX1, MPHOSPH6, DCTN1, SH3GL3, PLEKHC1, CD47, POLR2F, RHOH, and ADD1, or wherein the method further comprises measuring a level of expression of at least one gene selected from the group consisting of ITK, RALY, PSMC5, MYL6, CD1B, STMN1, GNA15, MDK, CAPG, ACTN1, CTNNA1, FARSLA, E2F4, CPSF1, SEPW1, TFRC, ABL1, TCF7, FGFR1, NUCB2, SMA3, FAT, VIM, and ATP2A3, wherein said level of expression of said gene indicates that said cell is sensitive to Rituximab.

22. The method of claim 1, wherein said at least one gene is selected from the group consisting of TRA1, ACTN4, CALM1, CD63, FKBP1A, CALU, IQGAP1, MGC8721, STAT1, TACC1, TM4SF8, CD59, CKAP4, DUSP1, RCN1, MGC8902, LGALS1, BHLHB2, RRBP1, PRNP, IER3, MARCKS, LUM, FER1L3, SLC20A1, HEXB, EXT1, TJP1, CTSL, SLC39A6, RIOK3, CRK, NNMT, TRAM2, ADAM9, DNAJC7, PLSCR1, PRSS23, PLOD2, NPC1, TOB1, GFPT1, IL8, PYGL, LOXL2, KIAA0355, UGDH, PURA, ULK2, CENTG2, NID2, CAP350, CXCL1, BTN3A3, IL6, WNT5A, FOXF2, LPHN2, CDH11, P4HA1, GRP58, DSIPI, MAP1LC3B, GALIG, IGSF4, IRS2, ATP2A2, OGT, TNFRSF10B, KIAA1128, TM4SF1, RBPMS, RIPK2, CBLB, NR1D2, SLC7A11, MPZL1, SSA2, NQO1, ASPH, ASAH1, MGLL, SERPINB6, HSPA5, ZFP36L1, COL4A1, CD44, SLC39A14, NIPA2, FKBP9, IL6ST, DKFZP564G2022, PPAP2B, MAP1B, MAPK1, MYO1B, CAST, RRAS2, QKI, LHFPL2, 38970, ARHE, KIAA1078, FTL, KIAA0877, PLCB1, KIAA0802, RAB3GAP, SERPINB1, TIMM17A, SOD2, HLA-A, NOMO2, LOC55831, PHLDA1, TMEM2, MLPH, FAD104, LRRC5, RAB7L1, FLJ35036, DOCK10, LRP12, TXNDC5, CDCl₄B, HRMT1L1, CORO1C, DNAJC10, TNPO1, LONP, AMIGO2, DNAPTP6, and ADAMTS1, or wherein the method further comprises measuring a level of expression of at least one gene selected from the group consisting of WARS, CD81, CTSB, PKM2, PPP2CB, CNN3, ANXA2, JAK1, EIF4G3, COL1A1, DYRK2, NFIL3, ACTN1, CAPN2, BTN3A2, IGFBP3, FN1, COL4A2, and KPNB1, or wherein the method further comprises measuring a level of expression of at least one microRNA selected from the group consisting of hsa-mir-136-prec, Hcd570, Hcd873, Hcd282PO, Hcd799, Hcd829, Hcd210_HPR205, hsa-mir-2,9-prec, hsa-mir-202, hsa-mir-429, Hcd693, hsa-mir-022-prec, MPR88, hsa-mir-198-prec, hsa-mir-199b-prec, Hcd145, hsa-mir-124a-2-prec, hsa-mir-138-2-prec, Hcd960, Hcd869, Hcd384, hsa-mir-027b-prec, Hcd444, hsa-mir-194-2, hsa-mir-197-prec, Hcd913, HPR163, hsa-mir-138-1-prec, hsa-mir-010a-prec, hsa-mir-023b-prec, hsa-mir-193b, Hcd654, Hcd542, hsa-mir-199a-2-prec, hsa-mir-2,4-prec, Hcd608, Hcd684, hsa-mir-145-prec, hsa-mir-023a-prec, hsa-mir-024-2-prec, and hsa-mir-199a-1-prec, wherein said level of expression of said gene or microRNA indicates that said cell is sensitive to radiation therapy.

23. The method of claim 1, wherein said at least one gene is selected from the group consisting of FAU, NOL5A, ANP32A, ARHGDIB, LBR, FABP5, ITM2A, SFRS5, IQGAP2, SLC7A6, SLA, IL2RG, MFNG, GPSM3, PIM2, EVER1, LRMP, ICAM2, RIMS3, FMNL1, MYB, PTPN7, LCK, CXorf9, RHOH, ZNFN1A1, CENTB1, LCP2, DBT, CEP1, IL6R, VAV1, MAP4K1, CD28, PTP4A3, CD3G, LTB, USP34, NVL, CD8B1, SFRS6, LCP1, CXCR4, PSCDBP, SELPLG, CD3Z, PRKCQ, CD1A, GATA2, P2RX5, LAIR1, C1orf38, SH2D1A, TRB@, SEPT6, HA-1, DOCK2, WBSCR20C, CD3D, RNASE6, SFRS7, WBSCR20A, NUP210, CD6, HNRPA1, AIF1, CYFIP2, GLTSCR2, C11orf2, ARHGAP15, BIN2, SH3TC1, STAG3, TM6SF1, C15orf25, FLJ22457, PACAP, and MGC2744, or wherein the method further comprises measuring a level of expression of at least one microRNA selected from the group consisting of hsa-mir-092-prec-X=092-2, hsa-mir-123-prec, hsa-mir-106a, hsa-mir-20b, hsa-mir-0,7-prec, hsa-mir-019b-2-prec, hsa-mir-033-prec, hsa-mir-092-prec-13=092-1, hsa-mir-122a-prec, Hcd783, MPR216, hsa-mir-019b-1-prec, hsa-mir-135-2-prec, hsa-mir-128b-prec, hsa-mir-025-prec, Hcd511, hsa-mir-093-prec-7.1=093-1, hsa-mir-106-prec-X, hsa-mir-142-prec, HPR169, hsa-mir-223-prec, hsa-mir-018-prec, and hsa-mir-020-prec, wherein said level of expression of said gene or microRNA indicates that said cell is sensitive to PXD101 (belinostat).

24. The method of claim 1, wherein said at least one gene is selected from the group consisting of CD99, SNRPA, CUGBP2, STAT5A, SLA, IL2RG, GTSE1, MYB, PTPN7, CXorf9, RHOH, ZNFN1A1, CENTB1, LCP2, HIST1H4C, CCR7, APOBEC3B, MCM7, LCP1, SELPLG, CD3Z, PRKCQ, GZMB, SCN3A, LAIR1, SH2D1A, SEPT6, CG018, CD3D, C18orf10, PRF1, AIF1, MCM5, LPXN, C22orf18, ARHGAP15, and LEF1, or wherein the method further comprises measuring a level of expression of at least one microRNA selected from the group consisting of hsa-mir-096-prec-7, Hcd605, hsa-mir-20b, hsa-miR-373*, HUMTRAB, hsa-mir-019b-1-prec, HPR163, hsa-mir-371, hsa-mir-025-prec, hsa-mir-18b, hsa-mir-093-prec-7.1=093-1, hsa-mir-106-prec-X, hsa-mir-142-prec, and hsa-mir-020-prec, wherein said level of expression of said gene or microRNA indicates that said cell is sensitive to 5-Aza-2′-deoxycytidine (Decitabine).

25. The method of claim 1, wherein said at least one gene is selected from the group consisting of SLC9A3R1, RPS19, ITM2A, SSBP2, CXorf9, RHOH, ZNFN1A1, FXYD2, CCR9, NAP1L1, CXCR4, SH2D1A, CD1A, TRB@, SEPT6, RPS2, DOCK2, CD3D, CD6, ZAP70, AIF1, CD1E, CYFIP2, ADA, TRIM, GLTSCR2, FLJ10858, BCL11B, GIMAP6, STAG3, UBASH3A or wherein the method further comprises measuring a level of expression of at least one gene selected from the group consisting of MRPS24, TRIM22, TRIM41, LAT, CD1C, MRPS22, ADAM11, RPL13, RPS27, RPL13, RPS25, RPL18A, CORO1A, PTPRCAP, GMFG, ITK, CD1B, GMFG, PTPRCAP, CORO1A, ITGB2, HCLS1, and ATP2A3, or wherein the method further comprises measuring a level of expression of at least one microRNA selected from the group consisting of HUMTRF, hsa-mir-483, MPR74, hsa-mir-122a-prec, ath-MIR180a, hsa-mir-128b-prec, Hcd923, hsa-mir-106-prec-X, hsa-mir-342, hsa-mir-142-prec, HPR169, hsa-mir-223-prec, Hcd754, and hsa-mir-020-prec, wherein said level of expression of said gene or microRNA indicates that said cell is sensitive to Idarubicin.

26. The method of claim 1, wherein said at least one gene is selected from the group consisting of CD99, HLA-DPB1, ARHGDIB, IFITM1, UBE2L6, ITM2A, SERPINA1, STAT5A, INPP5D, DGKA, SATB1, SEMA4D, TFDP2, SLA, IL2RG, CD48, MFNG, ALOX5AP, GPSM3, PSMB9, KIAA0711, SELL, ADA, EDG1, RIMS3, FMNL1, MYB, PTPN7, LCK, CXorf9, RHOH, ZNFN1A1, CENTB1, LCP2, FXYD2, CD1D, BATF, STAT4, VAV1, MAP4K1, CCR7, PDE4C, CD3G, CCR9, SP110, LCP1, IFI16, CXCR4, ARHGEF6, GATA3, SELPLG, SEC31L2, CD3Z, PRKCQ, SH2D1A, GZMB, CD1A, SCN3A, LAIR1, FYB, TRB@, SEPT6, HA-1, DOCK2, CG018, CD3D, T3JAM, FNBP1, CD6, ZAP70, LST1, GPR65, PRF1, AIF1, FLJ20331, RAG2, WDR45, CD1E, CYFIP2, TARP, TRIM, RPL10L, GLTSCR2, GIMAP5, ARHGAP15, NOTCH1, BIN2, C13orf18, CECR1, BCL11B, GIMAP6, STAG3, TM6SF1, HSD17B7, UBASH3A, MGC5566, FLJ22457, TPK1, PHF11, and DKFZP434B0335, or wherein the method further comprises measuring a level of expression of at least one gene selected from the group consisting of FLJ10534, PTPRC, TRIM22, C18orf1, EVL, TRIM41, PSME2, LAT, CD1C, MYBBP1A, ICAM3, ADAM11, CD53, FARSLA, RPL13, RAC2, RPL13, GNA15, PGF, LAPTM5, RPL18A, CD53, CORO1A, PTPRCAP, PTPRC, HEM1, GMFG, GNA15, ITK, CD1B, GMFG, PTPRCAP, PTPRC, CD53, CORO1A, HEM1, GNA15, TCF7, ITGB2, PTPRC, HCLS1, ATP2A3, MYBL1, and FARSLA, or wherein the method further comprises measuring a level of expression of at least one microRNA selected from the group consisting of hsa-mir-124a-3-prec, hsa-mir-181a-prec, Hcd773, Hcd683, Hcd796, HUMTRF, HUMTRS, hsa-mir-181b-2, Hcd294, hsa-mir-20b, hsa-mir-181d, hsa-mir-2,3-prec, Hcd148_HPR225left, hsa-mir-515-15p, hsa-mir-181b-prec, Hcd783, HUMTRAB, HUMTRN, hsa-mir-181b-1, hsa-mir-124a-1-prec1, hsa-mir-367, hsa-mir-128b-prec, Hcd438right, hsa-mir-025-prec, hsa-mir-2,6-prec, Hcd731, hsa-mir-093-prec-7.1=093-1, hsa-mir-106-prec-X, hsa-mir-342, hsa-mir-142-prec, HSHELA01, HUMTRV1A, hsa-mir-223-prec, Hcd754, and hsa-mir-020-prec, wherein said level of expression of said gene or microRNA indicates that said cell is sensitive to Melphalan.

27. The method of claim 1, wherein said at least one gene is selected from the group consisting of MCL1, DDX23, JUNB, ZFP36, IFITM1, CKS1B, SERPINA1, IL4R, CLDN3, ARL4A, HMMR, FLJ12671, ANKHD1, KIF2C, RPA3, MCCC2, CDH17, LSM5, PRF1, ROD1, FLJ12666, SUV420H1, MUC13, C13orf18, and CDCA8, or wherein the method further comprises measuring a level of expression of at least one gene selected from the group consisting of ETS2, AR1D1A, ID1, DDC, NID2, CCT3, ID2, NFIL3, and AREG, or wherein the method further comprises measuring a level of expression of at least one microRNA selected from the group consisting of Hcd829, hsa-mir-197-prec, HPR163, and hsa-mir-150-prec, wherein said level of expression of said gene or microRNA indicates that said cell is sensitive to IL4-PE38 fusion protein.

28. The method of claim 1, wherein said at least one gene is selected from the group consisting of MCL1, DDX23, JUNB, ZFP36, IFITM1, CKS1B, SERPINA1, IL13R, CLDN3, ARL4A, HMMR, FLJ12671, ANKHD1, KIF2C, RPA3, MCCC2, CDH17, LSM5, PRF1, ROD1, FLJ12666, SUV420H1, MUC13, C13orf18, and CDCA8, or wherein the method further comprises measuring a level of expression of at least one gene selected from the group consisting of ETS2, AR1D1A, ID1, DDC, NID2, CCT3, ID2, NFIL3, and AREG, or wherein the method further comprises measuring a level of expression of at least one microRNA selected from the group consisting of Hcd829, hsa-mir-197-prec, HPR163, and hsa-mir-150-prec, wherein said level of expression of said gene or microRNA indicates that said cell is sensitive to IL13-PE38QQR fusion protein (cintredekin besudotox).

29. The method of claim 1, wherein said at least one gene is selected from the group consisting of STOM, TNFAIP3, ASNS, GARS, CXCR4, EGLN3, LBH, and GDF15, or wherein the method further comprises measuring a level of expression of at least one gene selected from the group consisting of STOML1 and KIAA0746, or wherein the method further comprises measuring a level of expression of at least one microRNA selected from the group consisting of hsa-mir-034prec, Hcd255, Hcd712, Hcd965, Hcd891, Hcd210_HPR205, hsa-mir-429, Hcd753, Hcd693, MPR203, Hcd704, Hcd863PO, hsa-mir-122a-prec, Hcd760, Hcd338, HPR213, Hcd852, Hcd366, MPR103, Hcd669, and hsa-mir-188-prec, wherein said level of expression of said gene or microRNA indicates that said cell is sensitive to Valproic acid (VPA).

30. The method of claim 1, wherein said at least one gene is selected from the group consisting of PPIB, ZFP36L2, IFI30, USP7, SRM, SH3BP5, ALDOC, FADS2, GUSB, PSCD1, IQGAP2, STS, MFNG, FLI1, PIM2, INPP4A, LRMP, ICAM2, EVI2A, MAL, BTN3A3, PTPN7, IL10RA, SPI1, TRAF1, ITGB7, ARHGAP6, MAP4K1, CD28, PTP4A3, LTB, C1orf38, WBSCR22, CD8B1, LCP1, FLJ13052, MEF2C, PSCDBP, IL16, SELPLG, MAGEA9, LAIR1, TNFRSF25, EVI2B, IGJ, PDCD4, RASA4, HA-1, PLCL2, RNASE6, WBSCR20C, NUP210, RPL10L, C11orf2, CABC1, ARHGEF3, TAPBPL, CHST12, FKBP11, FLJ35036, MYLIP, TXNDC5, PACAP, TOSO, PNAS-4, IL21R, and TCF4, or wherein the method further comprises measuring a level of expression of at least one gene selected from the group consisting of CLTB, BTN3A2, BCL2, SETBP1, ICAM3, BCL2, BCL2, BCL2, CD53, CCND2, CLTB, CLTB, BCL2L11, BTN3A2, CD37, MYCL2, CTSS, LAPTM5, CD53, CORO1A, HEM1, CD53, CORO1A, HEM1, HCLS1, BCL2L11, MYCL1, MYC, and MAN1A1, or wherein the method further comprises measuring a level of expression of at least one microRNA selected from the group consisting of Hcd257, hsa-mir-148-prec, Hcd512, HPR227, Hcd421, MPR203, hsa-mir-0,7-prec, hsa-mir-219-2, hsa-mir-328, Hcd783, Hcd181, HPR213, hsa-mir-191-prec, hsa-mir-375, hsa-mir-2,2-prec, Hcd913, Hcd716, MPR207, HPR206, hsa-mir-016b-chr3, Hcd654, hsa-mir-195-prec, Hcd425, hsa-mir-148a, hsa-mir-142-prec, and hsa-mir-016a-chr13, wherein said level of expression of said gene or microRNA indicates that said cell is sensitive to All-trans retinoic acid (ATRA).

31. The method of claim 1, wherein said at least one gene is selected from the group consisting of C6orf29, TRIM31, CD69, LRRN3, GPR35, and CDW52, or wherein the method further comprises measuring a level of expression of at least one microRNA selected from the group consisting of Hcd99, hsa-mir-520c/526a, hsa-mir-191-prec, hsa-mir-205-prec, hsa-mir-375, hsa-mir-423, hsa-mir-449, and hsa-mir-196-2-prec, wherein said level of expression of said gene or microRNA indicates that said cell is sensitive to Cytoxan.

32. The method of claim 1, wherein said at least one gene is selected from the group consisting of K-ALPHA-1, CSDA, UCHL1, NAP1L1, ATP5G2, HDGFRP3, and IFI44, or wherein the method further comprises measuring a level of expression of at least one microRNA selected from the group consisting of HUMTRF, MPR74, hsa-mir-2,3-prec, hsa-mir-155-prec, hsa-mir-181b-prec, hsa-mir-342, and hsa-mir-4323p, wherein said level of expression of said gene or microRNA indicates that said cell is sensitive to Topotecan (Hycamtin).

33. The method of claim 1, wherein said at least one gene is selected from the group consisting of NOL5A, STOM, SIAT1, CUGBP2, GUSB, ITM2A, JARID2, RUNX3, ICAM2, PTPN7, VAV1, PTP4A3, MCAM, MEF2C, IDH3B, RFP, SEPT6, SLC43A3, WBSCR20C, SHMT2, GLTSCR2, CABC1, FLJ20859, FLJ20010, MGC10993, and FKBP11, or wherein the method further comprises measuring a level of expression of at least one gene selected from the group consisting of STOML1, EIF4A1, PDE3B, BCL11A, INPP4B, HLA-DMA, TRFP, EIF4A1, GAS7, MYCL2, HCLS1, MYCL1, and MYC, or wherein the method further comprises measuring a level of expression of at least one microRNA selected from the group consisting of hsa-mir-092-prec-X=092-2, hsa-mir-123-prec, hsa-mir-514-1, hsa-mir-101-prec-9, hsa-mir-148-prec, hsa-mir-106a, hsa-mir-20b, Hcd781, hsa-mir-0,7-prec, hsa-mir-019b-2-prec, hsa-mir-033-prec, hsa-mir-092-prec-13=092-1, hsa-mir-107, hsa-mir-103-prec-5=103-1, MPR216, hsa-mir-29b-2=102prec7.1=7.2, hsa-mir-019b-1-prec, hsa-mir-107-prec-10, hsa-mir-135-2-prec, Hcd581, hsa-mir-103-2-prec, Hcd230, hsa-mir-025-prec, hsa-mir-208-prec, hsa-mir-18b, hsa-mir-093-prec-7.1=093-1, hsa-mir-106-prec-X, hsa-mir-142-prec, HPR169, hsa-mir-0,8-prec, and hsa-mir-020-prec, wherein said level of expression of said gene or microRNA indicates that said cell is sensitive to Suberoylanilide hydroxamic acid (SAHA, vorinostat, Zolinza).

34. The method of claim 1, wherein said at least one gene is selected from the group consisting of ZFP36L2, TRIB2, LCP2, C6orf32, IL16, CACNA1G, SPDEF, HAB1, TOSO, and ARHGAP25, or wherein the method further comprises measuring a level of expression of at least one gene selected from the group consisting of SGCD and CAPN3, or wherein the method further comprises measuring a level of expression of at least one microRNA selected from the group consisting of Hcd415, hsa-mir-147-prec, hsa-mir-033b-prec, Hcd778, hsa-mir-127-prec, hsa-mir-324, Hcd794, and Hcd634, wherein said level of expression of said gene or microRNA indicates that said cell is sensitive to Depsipeptide (FR901228).

35. The method of claim 1, wherein said at least one gene is selected from the group consisting of PLEKHB2, ARPC1B, MX1, CUGBP2, IFI16, TNFRSF14, SP110, ELF1, LPXN, IFRG28, LEF1, and PYCARD, or wherein the method further comprises measuring a level of expression of HMX1, or wherein the method further comprises measuring a level of expression of at least one microRNA selected from the group consisting of MPR121, Hcd115, Hcd693, Hcd704, HPR100, Hcd760, hsa-mir-147-prec, hsa-mir-033b-prec, hsa-mir-146-prec, Hcd142, hsa-mir-501, Hcd716, MPR207, Hcd777, hsa-mir-204-prec, hsa-mir-146b, Hcd511, Hcd397, MPR130, Hcd782, hsa-mir-324, Hcd794, and Hcd739, wherein said level of expression of said gene or microRNA indicates that said cell is sensitive to Bortezomib.

36. The method of claim 1, wherein said at least one gene is selected from the group consisting of SSRP1, ALDOC, C1QR1, TTF1, PRIM1, USP34, TK2, GOLGIN-67, NPDO14, KIAA0220, SLC43A3, WBSCR20C, ICAM2, TEX10, CHD7, SAMSN1, and TPRT, or wherein the method further comprises measuring a level of expression of at least one gene selected from the group consisting of PTPRC, CD53, RNPS1, H3F3A, NUDC, SMARCA4, RPL32, PTMA, CD53, PTPRCAP, PTPRC, RPL32, PTPRCAP, PTPRC, CD53, PTPRC, HCLS1, and SLC19A1, or wherein the method further comprises measuring a level of expression of at least one microRNA selected from the group consisting of hsa-mir-092-prec-X=092-2, hsa-mir-096-prec-7, hsa-mir-123-prec, MPR249, HPR232, hsa-mir-101-prec-9, hsa-mir-106a, hsa-mir-20b, Hcd861, hsa-mir-017-prec, hsa-mir-019b-2-prec, hsa-mir-033-prec, Hcd102, MPR216, Hcd975, hsa-mir-019b-1-prec, hsa-mir-135-2-prec, Hcd581, Hcd536_HPR104, hsa-mir-128b-prec, HSTRNL, hsa-mir-025-prec, hsa-mir-18b, HPR262, Hcd923, Hcd434, Hcd658, HPR129, hsa-mir-380-5p, hsa-mir-093-prec-7.1=093-1, hsa-mir-106-prec-X, Hcd627, hsa-mir-142-prec, hsa-mir-018-prec, and hsa-mir-020-prec, wherein said level of expression of said gene or microRNA indicates that said cell is sensitive to Leukeran.

37. The method of claim 1, wherein said at least one gene is selected from the group consisting of HLA-E, BAT3, ENO2, UBE2L6, CUGBP2, ITM2A, PALM2-AKAP2, JARID2, DGKA, SLC7A6, TFDP2, ADA, EDG1, ICAM2, PTPN7, CXorf9, RHOH, MX2, ZNFN1A1, COCH, LCP2, CLGN, BNC1, FLNC, HLA-DRB3, UCP2, HLA-DRB1, GATA3, PRKCQ, SH2D1A, NFATC3, TRB@, FNBP1, SEPT6, NME4, DKFZP434C171, ZC3HAV1, SLC43A3, CD3D, AIF1, SPTAN1, CD1E, TRIM, DATF1, FHOD1, ARHGAP15, STAG3, SAP130, and CYLD, or wherein the method further comprises measuring a level of expression of at least one gene selected from the group consisting of PTPRC, MX2004PA11424, TRIM22, TRIM41, CD1C, CHD8, ADAM11, ANPEP, RBMX2, RAC2, GNA15, LAPTM5, PTPRCAP, PTPRC, GNA15, CD1B, PTPRCAP, PTPRC, GNA15, PTPRC, and ATP2A3, or wherein the method further comprises measuring a level of expression of at least one microRNA selected from the group consisting of Hcd773, Hcd248, hsa-mir-181d, MPR74, hsa-mir-2,3-prec, hsa-mir-155-prec, MPR197, hsa-mir-181b-prec, hsa-mir-29b-2=102prec7.1=7.2, hsa-mir-029c-prec, Hcd318, hsa-mir-128b-prec, hsa-mir-130a-prec, hsa-mir-140, hsa-mir-16-2, hsa-mir-526a-2, hsa-mir-016b-chr3, hsa-mir-195-prec, hsa-mir-2,6-prec, hsa-mir-342, hsa-mir-29b-1, Hcd627, hsa-mir-102-prec-1, hsa-mir-142-prec, hsa-mir-223-prec, hsa-let-7f-2-prec2, and hsa-mir-016a-chr13, wherein said level of expression of said gene or microRNA indicates that said cell is sensitive to Fludarabine.

38. The method of claim 1, wherein said at least one gene is CD99, or wherein the method further comprises measuring a level of expression of at least one microRNA selected from the group consisting of Hcd794 and Hcd754, wherein said level of expression of said gene or microRNA indicates that said cell is sensitive to Vinblastine.

39. The method of claim 1, wherein said at least one gene is selected from the group consisting of RPLP2, BTG1, CSDA, ARHGDIB, INSIG1, ALDOC, WASPIP, C1QR1, EDEM1, SLA, MFNG, GPSM3, ADA, LRMP, EVI2A, FMNL1, PTPN7, RHOH, ZNFN1A1, CENTB1, MAP4K1, CD28, SP110, NAP1L1, IFI16, ARHGEF6, SELPLG, CD3Z, SH2D1A, LAIR1, RAFTLIN, HA-1, DOCK2, CD3D, T3JAM, ZAP70, GPR65, CYFIP2, LPXN, RPL10L, GLTSCR2, ARHGAP15, BCL11B, TM6SF1, PACAP, and TCF4, or wherein the method further comprises measuring a level of expression of at least one gene selected from the group consisting of PTPRC, BCL2, LAT, ICAM3, BCL2, BCL2, BCL2, ADAM11, CD53, FARSLA, BCL2L11, RPL13, RAC2, RPL13, MYCL2, LAPTM5, RPL18A, CD53, CORO1A, PTPRCAP, PTPRC, HEM1, GMFG, GMFG, PTPRCAP, PTPRC, CD53, CORO1A, HEM1, PTPRC, HCLS1, BCL2L11, MYCL1, FARSLA, and MYC, or wherein the method further comprises measuring a level of expression of at least one microRNA selected from the group consisting of hsa-mir-096-prec-7, hsa-mir-124a-3-prec, hsa-mir-101-prec-9, Hcd712, Hcd693, hsa-mir-219-2, Hcd145, hsa-mir-155-prec, HPR213, hsa-mir-2,2-prec, Hcd913, Hcd716, MPR207, Hcd559, Hcd654, Hcd739, and hsa-mir-142-prec, wherein said level of expression of said gene or microRNA indicates that said cell is sensitive to Busulfan.

40. The method of claim 1, wherein said at least one gene is selected from the group consisting of ARHGDIB, ITM2A, SSBP2, PIM2, SELL, ICAM2, EVI2A, MAL, PTPN7, ZNFN1A1, LCP2, ARHGAP6, CD28, CD8B1, LCP1, NPDO14, CD69, NFATC3, TRB@, IGJ, SLC43A3, DOCK2, FHOD1, and PACAP, or wherein the method further comprises measuring a level of expression of at least one gene selected from the group consisting of ICAM3, CD53, SMARCA4, CD37, LAPTM5, CD53, CORO1A, HEM1, GMFG, GMFG, CD53, CORO1A, HEM1, and HCLS1, or wherein the method further comprises measuring a level of expression of at least one microRNA selected from the group consisting of hsa-mir-092-prec-X=092-2, hsa-mir-123-prec, hsa-mir-101-prec-9, Hcd517, Hcd796, Hcd749, Hcd674, hsa-mir-019b-2-prec, hsa-mir-033-prec, hsa-mir-092-prec-13=092-1, hsa-mir-124a-2-prec, hsa-mir-143-prec, hsa-mir-516-43p, hsa-mir-2,6-prec, Hcd731, hsa-mir-106-prec-X, hsa-mir-142-prec, hsa-mir-223-prec, Hcd754, and hsa-mir-018-prec, wherein said level of expression of said gene or microRNA indicates that said cell is sensitive to Dacarbazine.

41. The method of claim 1, wherein said at least one gene is selected from the group consisting of RPL18, RPL10A, RPS3A, EEF1B2, GOT2, RPL13A, RPS15, NOL5A, RPLP2, SLC9A3R1, EIF3S3, MTHFD2, IMPDH2, ALDOC, FABP5, ITM2A, PCK2, MFNG, GCH1, PIM2, ADA, ICAM2, TTF1, MYB, PTPN7, RHOH, ZNFN1A1, PRIM1, FHIT, ASS, SYK, OXA1L, LCP1, DDX18, NOLA2, KIAA0922, PRKCQ, NFATC3, ANAPC5, TRB@, CXCR4, FNBP4, SEPT6, RPS2, MDN1, PCCB, RASA4, WBSCR20C, SFRS7, WBSCR20A, NUP210, SHMT2, RPLP0, MAP4K1, HNRPA1, CYFIP2, RPL10L, GLTSCR2, MRPL16, MRPS2, FLJ12270, CDK5RAP3, ARHGAP15, CUTC, FKBP11, ADPGK, FLJ22457, PUS3, PACAP, and CALML4, or wherein the method further comprises measuring a level of expression of at least one gene selected from the group consisting of MRPS24, DUSP2, EIF4A1, BRD2, BCL11A, RASSF2, MRPL37, MRPL30, RASSF1, MYBBP1A, LASS2, MRPS22, ADAM11, CD53, RPS6 KB1, RNPS1, BRD2, EIF4A1, FBL, BRD2, RPL36A, RPL13, RPL38, H3F3A, KIAA0182, RPS27, RPS6, EEF1G, RPL13, MYCL2, FBLN1, RPS25, RPL32, PTMA, RPL18A, RPL3, CD53, CORO1A, HEM1, GMFG, RPL32, GMFG, CD53, CORO1A, HEM1, HCLS1, ATP2A3, RASSF7, MYCL1, MYBL1, MYC, RPS15A, RASSF2, and LASS6, or wherein the method further comprises measuring a level of expression of at least one microRNA selected from the group consisting of hsa-mir-092-prec-X=092-2, hsa-mir-148-prec, hsa-mir-20b, hsa-mir-007-2-prec, hsa-mir-0,7-prec, hsa-mir-019b-2-prec, Hcd760, Hcd783, MPR216, hsa-mir-375, hsa-mir-019b-1-prec, hsa-mir-135-2-prec, hsa-mir-150-prec, hsa-mir-128b-prec, hsa-mir-499, hsa-mir-025-prec, hsa-mir-007-1-prec, hsa-mir-019a-prec, hsa-mir-093-prec-7.1=093-1, hsa-mir-106-prec-X, hsa-mir-142-prec, HPR169, hsa-mir-018-prec, hsa-mir-020-prec, and hsa-mir-484, wherein said level of expression of said gene or microRNA indicates that said cell is sensitive to Oxaliplatin.

42. The method of claim 1, wherein said at least one gene is selected from the group consisting of CSDA, INSIG1, UBE2L6, PRG1, ITM2A, DGKA, SLA, PCBP2, IL2RG, ALOX5AP, PSMB9, LRMP, ICAM2, PTPN7, CXorf9, RHOH, ZNFN1A1, CENTB1, LCP2, STAT4, CCR7, CD3G, SP110, TNFAIP8, IFI16, CXCR4, ARHGEF6, SELPLG, CD3Z, PRKCQ, SH2D1A, CD1A, NFATC3, LAIR1, TRB@, SEPT6, RAFTLIN, DOCK2, CD3D, CD6, AIF1, CD1E, CYFIP2, TARP, ADA, ARHGAP15, GIMAP6, STAG3, FLJ22457, PACAP, and TCF4, or wherein the method further comprises measuring a level of expression of at least one gene selected from the group consisting of PTPRC, TRIM22, PSME2, LAT, CD1C, ICAM3, ADAM11, CD53, FARSLA, RPL13, RAC2, RPL13, NK4, LAPTM5, CD53, CORO1A, PTPRCAP, PTPRC, HEM1, GMFG, GMFG, PTPRCAP, PTPRC, CD53, CORO1A, HEM1, ITGB2, PTPRC, HCLS1, ATP2A3, and FARSLA, or wherein the method further comprises measuring a level of expression of at least one microRNA selected from the group consisting of Hcd257, Hcd768, Hcd796, HUMTRF, HUMTRS, MPR74, hsa-mir-2,3-prec, hsa-mir-155-prec, Hcd763, hsa-mir-181b-prec, ath-MIR180a, hsa-mir-2,6-prec, hsa-mir-342, hsa-mir-142-prec, HSHELA01, HUMTRV1A, hsa-mir-223-prec, Hcd754, and hsa-mir-020-prec, wherein said level of expression of said gene or microRNA indicates that said cell is sensitive to Hydroxyurea.

43. The method of claim 1, wherein said at least one gene is selected from the group consisting of RPL11, RPL17, ANAPC5, RPL13A, STOM, TUFM, SCARB1, FABP5, KIAA0711, IL6R, WBSCR22, UCK2, GZMB, C1orf38, PCBP2, GPR65, GLTSCR2, and FKBP11, or wherein the method further comprises measuring a level of expression of at least one gene selected from the group consisting of STOML1, MRPL37, MRPL30, RPL36A, RPL38, HSPD1, MIF, RPL32, RPL3, and RPL32, or wherein the method further comprises measuring a level of expression of at least one microRNA selected from the group consisting of Hcd257, Hcd946, Hcd503, hsa-mir-429, Hcd693, hsa-miR-373*, Hcd738, hsa-mir-328, Hcd783, Hcd181, Hcd631, Hcd279, hsa-mir-194-2, hsa-mir-197-prec, HPR163, hsa-mir-150-prec, Hcd323, hsa-mir-103-2-prec, Hcd243, Hcd938, hsa-mir-025-prec, hsa-mir-007-1-prec, MPR243, Hcd511, Hcd654, hsa-mir-199a-2-prec, hsa-mir-2,4-prec, hsa-mir-093-prec-7.1=093-1, hsa-mir-106-prec-X, Hcd794, Hcd530, HSHELA01, Hcd754, and hsa-mir-020-prec, wherein said level of expression of said gene or microRNA indicates that said cell is sensitive to Tegafur.

44. The method of claim 1, wherein said at least one gene is selected from the group consisting of ALDOC, ITM2A, SLA, SSBP2, IL2RG, MFNG, SELL, STC1, LRMP, MYB, PTPN7, CXorf9, RHOH, ZNFN1A1, CENTB1, MAP4K1, CCR7, CD3G, CCR9, CBFA2T3, CXCR4, ARHGEF6, SELPLG, SEC31L2, CD3Z, SH2D1A, CD1A, SCN3A, LAIR1, TRB@, DOCK2, WBSCR20C, CD3D, T3JAM, CD6, ZAP70, GPR65, AIF1, WDR45, CD1E, CYFIP2, TARP, TRIM, ARHGAP15, NOTCH1, STAG3, UBASH3A, MGC5566, and PACAP, or wherein the method further comprises measuring a level of expression of at least one gene selected from the group consisting of PTPRC, TRIM22, TRIM41, LAT, CD1C, MYBBP1A, CD53, FARSLA, PPP2CA, LAPTM5, CD53, CORO1A, PTPRCAP, PTPRC, HEM1, GMFG, ITK, CD1B, GMFG, PTPRCAP, PTPRC, CD53, CORO1A, HEM1, TCF7, PTPRC, HCLS1, ATP2A3, MYBL1, and FARSLA, or wherein the method further comprises measuring a level of expression of at least one microRNA selected from the group consisting of Hcd768, HUMTRF, Hcd145, Hcd923, hsa-mir-2,6-prec, hsa-mir-093-prec-7.1=093-1, hsa-mir-342, Hcd794, hsa-mir-142-prec, HSHELA01, hsa-mir-223-prec, and Hcd754, wherein said level of expression of said gene or microRNA indicates that said cell is sensitive to Daunorubicin.

45. The method of claim 1, wherein said at least one gene is selected from the group consisting of PFN1, CALU, ZYX, PSMD2, RAP1B, EPAS1, PGAM1, STAT1, CKAP4, DUSP1, RCN1, UCHL1, ITGA5, NFKBIA, LAMB1, TGFBI, FHL1, GJA1, PRG1, EXT1, MVP, NNMT, TAP1, CRIM1, PLOD2, RPS19, AXL, PALM2-AKAP2, IL8, LOXL2, PAPSS2, CAV1, F2R, PSMB9, LOX, C1orf29, STC1, LIF, KCNJ8, SMAD3, HPCAL1, WNT5A, BDNF, TNFRSF1A, NCOR2, FLNC, HMGA2, HLA-B, FLOT1, PTRF, IFI16, MGC4083, TNFRSF10B, PNMA2, TFPI, CLECSF2, SP110, PLAUR, ASPH, FSCN1, HIC, HLA-C, COL6A1, IL6ST, IFITM3, MAP1B, FLJ46603, RAFTLIN, FTL, KIAA0877, MT1E, CDC10, ZNF258, BCAT1, IFI44, SOD2, TMSB10, FLJ10350, C1orf24, EFHD2, RPS27L, TNFRSF12A, FAD104, RAB7L1, NME7, TMEM22, TPK1, ELK3, CYLD, AMIGO2, ADAMTS1, and ACTB, or wherein the method further comprises measuring a level of expression of at least one gene selected from the group consisting of ACLY, MPZL1, STC2, BAX, RAB31, RAB31, (UBC12, LOXL1, EMP3, FGFR1OP, IL6, TRIM22, OPTN, CYR61, METAP1, SHC1, FN1, EMP3, RAB31, LOXL1, BAX, BAX, RAB31, FN1, CD44, ANXA1, COL5A2, LGALS1, FGFR1, PLAU, TFPI2, TFPI2, VCAM1, SHC1, CSF2RA, EMP3, COL1A1, TGFB1, COL6A2, FGFR1, ITGA3, AKR1B1, MSN, EMP3, VIM, EMP3, COL6A2, MSN, PSMC5, UBC, FGFR1, BASP1, ANXA11, CSPG2, M6PRBP1, PRKCA, OPTN, OPTN, SPARC, CCL2, and ITGA3, or wherein the method further comprises measuring a level of expression of at least one microRNA selected from the group consisting of hsa-mir-125b-2-prec, hsa-mir-022-prec, hsa-mir-125b-1, hsa-mir-155-prec, hsa-mir-100, hsa-mir-409-3p, hsa-mir-495, hsa-mir-199a-2-prec, hsa-mir-382, and hsa-mir-100-1/2-prec, wherein said level of expression of said gene or microRNA indicates that said cell is sensitive to Bleomycin.

46. The method of claim 1, wherein said at least one gene is selected from the group consisting of HSPCB, LDHA, and TM4SF7, or wherein the method further comprises measuring a level of expression of LY6E, or wherein the method further comprises measuring a level of expression of at least one microRNA selected from the group consisting of Hcd338, hsa-mir-099b-prec-19, and hsa-mir-149-prec, wherein said level of expression of said gene or microRNA indicates that said cell is sensitive to Estramustine.

47. The method of claim 1, wherein said at least one gene is selected from the group consisting of CSDA, INSIG1, UBE2L6, PRG1, ITM2A, DGKA, TFDP2, SLA, IL2RG, ALOX5AP, GPSM3, PSMB9, SELL, ADA, EDG1, FMNL1, PTPN7, CXorf9, RHOH, ZNFN1A1, CENTB1, LCP2, CD1D, STAT4, VAV1, MAP4K1, CCR7, PDE4C, CD3G, CCR9, SP110, TNFAIP8, LCP1, IFI16, CXCR4, ARHGEF6, SELPLG, SEC31L2, CD3Z, PRKCQ, SH2D1A, GZMB, CD1A, LAIR1, AF1Q, TRB@, SEPT6, DOCK2, RPS19, CD3D, T3JAM, FNBP1, CD6, ZAP70, LST1, BCAT1, PRF1, AIF1, RAG2, CD1E, CYFIP2, TARP, TRIM, GLTSCR2, GIMAP5, ARHGAP15, NOTCH1, BCL11B, GIMAP6, STAG3, TM6SF1, UBASH3A, MGC5566, FLJ22457, and TPK1, or wherein the method further comprises measuring a level of expression of at least one gene selected from the group consisting of PTPRC, TRIM22, EVL, TRIM41, PSME2, LAT, CD1C, ADAM11, CD53, FARSLA, RPL13, RAC2, RPL13, GNA15, LAPTM5, RPL18A, CD53, CORO1A, PTPRCAP, PTPRC, HEM1, GMFG, GNA15, ITK, CD1B, GMFG, PTPRCAP, PTPRC, CD53, CORO1A, HEM1, GNA15, ITGB2, PTPRC, HCLS1, ATP2A3, and FARSLA, or wherein the method further comprises measuring a level of expression of at least one microRNA selected from the group consisting of hsa-mir-181a-prec, hsa-mir-181c-prec, HUMTRF, hsa-mir-181d, MPR74, Hcd817, hsa-mir-2,3-prec, hsa-mir-155-prec, Hcd148_HPR225left, hsa-mir-515-15p, hsa-mir-181b-prec, HUMTRN, hsa-mir-128b-prec, hsa-mir-450-2, hsa-mir-2,6-prec, hsa-mir-342, hsa-mir-142-prec, hsa-mir-223-prec, Hcd754, and hsa-mir-020-prec, wherein said level of expression of said gene or microRNA indicates that said cell is sensitive to Chlorambucil.

48. The method of claim 1, wherein said at least one gene is selected from the group consisting of PRG1, SLC2A3, RPS19, PSMB10, ITM2A, DGKA, SEMA4D, SLA, IL2RG, MFNG, ALOX5AP, GPSM3, PSMB9, SELL, ADA, FMNL1, MYB, PTPN7, CXorf9, RHOH, ZNFN1A1, CENTB1, FXYD2, CD1D, STAT4, MAP4K1, CCR7, PDE4C, CD3G, CCR9, SP110, TK2, TNFAIP8, NAP1L1, SELPLG, SEC31L2, CD3Z, PRKCQ, SH2D1A, GZMB, CD1A, LAIR1, TRB@, SEPT6, DOCK2, CG018, WBSCR20C, CD3D, CD6, LST1, GPR65, PRF1, ALMS1, AIF1, CD1E, CYFIP2, TARP, GLTSCR2, FLJ12270, ARHGAP15, NAP1L2, CECR1, GIMAP6, STAG3, TM6SF1, C15orf25, MGC5566, FLJ22457, ET, TPK1, and PHF11, or wherein the method further comprises measuring a level of expression of at least one gene selected from the group consisting of ETS2, PTPRC, PETER, SETBP1, LAT, MYBBP1A, ETV5, METAP1, ETS1, ADAM11, CD53, FARSLA, RPL13, ARMET, TETRAN, BET1, RPL13, MET, LAPTM5, CD53, CORO1A, PTPRCAP, PTPRC, HEM1, GMFG, CD1B, GMFG, PTPRCAP, PTPRC, CD53, CORO1A, HEM1, ETV4, ITGB2, PTPRC, HCLS1, MYBL1, FARSLA, and METAP2, or wherein the method further comprises measuring a level of expression of at least one microRNA selected from the group consisting of hsa-mir-124a-3-prec, Hcd946, Hcd683, HPR264, MPR185, HUMTRF, Hcd294, Hcd503, hsa-mir-20b, MPR74, MPR234, Hcd447, Hcd817, Hcd148_HPR225left, hsa-mir-515-15p, Hcd383, hsa-mir-181b-prec, Hcd783, MPR224, HPR172, MPR216, HUMTRN, hsa-mir-321, HPR159, MPR228, ath-MIR180a, hsa-mir-197-prec, hsa-mir-124a-1-prec1, hsa-mir-128b-prec, Hcd28_HPR39left, Hcd889, Hcd350, hsa-mir-025-prec, hsa-mir-208-prec, hsa-mir-450-2, Hcd923, Hcd434, HPR129, HPR220, hsa-mir-380-5p, hsa-mir-093-prec-7.1=093-1, hsa-mir-106-prec-X, hsa-mir-342, hsa-mir-142-prec, HSHELA01, hsa-mir-223-prec, Hcd754, hsa-mir-020-prec, and hsa-mir-4323p, wherein said level of expression of said gene or microRNA indicates that said cell is sensitive to Mechlorethamine.

49. The method of claim 1, wherein said at least one gene is selected from the group consisting of PGK1, SCD, INSIG1, IGBP1, TNFAIP3, TNFSF10, ABCA1, AGA, ABCA8, DBC1, PTGER2, UGT1A3, C10orf10, TM4SF13, CGI-90, LXN, DNAJC12, HIPK2, and C9orf95, or wherein the method further comprises measuring a level of expression of at least one gene selected from the group consisting of FGFR1OP, PLXNA1, PSCD2L, TUBB, FGFR1, TUBB2, PAGA, TUBB2, UBB, TUBB2, FGFR1, FGFR1, and TUBB-PARALOG, or wherein the method further comprises measuring a level of expression of at least one microRNA selected from the group consisting of hsa-mir-483, Hcd631, hsa-mir-2,2-prec, Hcd938, MPR133, Hcd794, Hcd438, and Hcd886, wherein said level of expression of said gene or microRNA indicates that said cell is sensitive to Streptozocin.

50. The method of claim 1, wherein said at least one gene is selected from the group consisting of RPLP2, CD99, IFITM1, INSIG1, ALDOC, ITM2A, SERPINA1, C1QR1, STAT5A, INPP5D, SATB1, VPS16, SLA, IL2RG, MFNG, SELL, LRMP, ICAM2, MYB, PTPN7, ARHGAP25, LCK, CXorf9, RHOH, ZNFN1A1, CENTB1, ADD2, LCP2, SPI1, DBT, GZMA, CD2, BATF, HIST1H4C, ARHGAP6, VAV1, MAP4K1, CCR7, PDE4C, CD3G, CCR9, SP140, TK2, LCP1, IFI16, CXCR4, ARHGEF6, PSCDBP, SELPLG, SEC31L2, CD3Z, PRKCQ, SH2D1A, GZMB, CD1A, GATA2, LY9, LAIR1, TRB@, SEPT6, HA-1, SLC43A3, DOCK2, CG018, MLC1, CD3D, T3JAM, CD6, ZAP70, DOK2, LST1, GPR65, PRF1, ALMS1, AIF1, PRDX2, FLJ12151, FBXW12, CD1E, CYFIP2, TARP, TRIM, RPL10L, GLTSCR2, CKIP-1, NRN1, ARHGAP15, NOTCH1, PSCD4, C13orf18, BCL11B, GIMAP6, STAG3, NARF, TM6SF1, C15orf25, FLJ11795, SAMSN1, UBASH3A, PACAP, LEF1, IL21R, TCF4, and DKFZP434B0335, or wherein the method further comprises measuring a level of expression of at least one gene selected from the group consisting of FLJ10534, PTPRC, CD27BP, TRIM22, TRIM41, PSCD2L, CD1C, MYBBP1A, ICAM3, CD53, FARSLA, GAS7, ABCD2, CD24, CD29, RAC2, CD37, GNA15, PGF, LAPTM5, RPL18A, CD53, CORO1A, PTPRCAP, PTPRC, HEM1, GMFG, GNA15, ITK, GMFG, PTPRCAP, PTPRC, CD53, CORO1A, HEM1, GNA15, TCF7, ITGB2, PTPRC, HCLS1, PRKCB1, ATP2A3, PRKCB1, MYBL1, and FARSLA, or wherein the method further comprises measuring a level of expression of at least one microRNA selected from the group consisting of hsa-mir-092-prec-X=092-2, Hcd517, Hcd796, HUMTRF, hsa-mir-20b, hsa-mir-019b-2-prec, hsa-mir-033-prec, hsa-mir-092-prec-13=092-1, Hcd148_HPR225left, HUMTRAB, Hcd975, hsa-mir-135-2-prec, hsa-mir-128b-prec, hsa-mir-143-prec, hsa-mir-025-prec, hsa-mir-2,6-prec, hsa-mir-093-prec-7.1=093-1, hsa-mir-106-prec-X, hsa-mir-142-prec, HSHELA01, HUMTRV1A, hsa-mir-223-prec, Hcd754, hsa-mir-018-prec, and hsa-mir-020-prec, wherein said level of expression of said gene or microRNA indicates that said cell is sensitive to Carmustine.

51. The method of claim 1, wherein said at least one gene is selected from the group consisting of RPS15, INSIG1, ALDOC, ITM2A, C1QR1, STAT5A, INPP5D, VPS16, SLA, USP20, IL2RG, MFNG, LRMP, EVI2A, PTPN7, ARHGAP25, RHOH, ZNFN1A1, CENTB1, LCP2, SPI1, ARHGAP6, MAP4K1, CCR7, LY96, C6orf32, MAGEA1, SP140, LCP1, IFI16, ARHGEF6, PSCDBP, SELPLG, CD3Z, PRKCQ, GZMB, LAIR1, SH2D1A, TRB@, RFP, SEPT6, HA-1, SLC43A3, CD3D, T3JAM, GPR65, PRF1, AIF1, LPXN, RPL10L, SITPEC, ARHGAP15, C13orf18, NARF, TM6SF1, PACAP, and TCF4, or wherein the method further comprises measuring a level of expression of at least one gene selected from the group consisting of PTPRC, ICAM3, TRFP, CD53, FARSLA, RAC2, MAGEA11, LAPTM5, CD53, CORO1A, PTPRCAP, PTPRC, HEM1, GMFG, GMFG, PTPRCAP, PTPRC, CD53, CORO1A, HEM1, PTPRC, HCLS1, SLC19A1, FARSLA, and RPS15A, or wherein the method further comprises measuring a level of expression of at least one microRNA selected from the group consisting of hsa-mir-101-prec-9, Hcd796, hsa-mir-20b, HUMTRAB, hsa-mir-135-2-prec, hsa-mir-153-1-prec1, hsa-mir-025-prec, hsa-mir-093-prec-7.1=093-1, hsa-mir-106-prec-X, hsa-mir-142-prec, HUMTRV1A, Hcd754, hsa-mir-018-prec, and hsa-mir-020-prec, wherein said level of expression of said gene or microRNA indicates that said cell is sensitive to Lomustine.

52. The method of claim 1, wherein said at least one gene is selected from the group consisting of SSRP1, ALDOC, C1QR1, TTF1, PRIM1, USP34, TK2, GOLGIN-67, NPDO14, KIAA0220, SLC43A3, WBSCR20C, ICAM2, TEX10, CHD7, SAMSN1, and TPRT, or wherein the method further comprises measuring a level of expression of at least one gene selected from the group consisting of PTPRC, CD53, RNPS1, H3F3A, NUDC, SMARCA4, RPL32, PTMA, CD53, PTPRCAP, PTPRC, RPL32, PTPRCAP, PTPRC, CD53, PTPRC, HCLS1, and SLC19A1, or wherein the method further comprises measuring a level of expression of at least one microRNA selected from the group consisting of hsa-mir-092-prec-X=092-2, hsa-mir-096-prec-7, hsa-mir-123-prec, MPR249, HPR232, hsa-mir-101-prec-9, hsa-mir-106a, hsa-mir-20b, Hcd861, hsa-mir-0,7-prec, hsa-mir-019b-2-prec, hsa-mir-033-prec, Hcd102, MPR216, Hcd975, hsa-mir-019b-1-prec, hsa-mir-135-2-prec, Hcd581, Hcd536_HPR104, hsa-mir-128b-prec, HSTRNL, hsa-mir-025-prec, hsa-mir-18b, HPR262, Hcd923, Hcd434, Hcd658, HPR129, hsa-mir-380-5p, hsa-mir-093-prec-7.1=093-1, hsa-mir-106-prec-X, Hcd627, hsa-mir-142-prec, hsa-mir-018-prec, and hsa-mir-020-prec, wherein said level of expression of said gene or microRNA indicates that said cell is sensitive to Mercaptopurine.

53. The method of claim 1, wherein said at least one gene is selected from the group consisting of CD99, INSIG1, PRG1, ALDOC, ITM2A, SLA, SSBP2, IL2RG, MFNG, ALOX5AP, C1orf29, SELL, STC1, LRMP, MYB, PTPN7, CXorf9, RHOH, ZNFN1A1, CENTB1, ADD2, CD1D, BATF, MAP4K1, CCR7, PDE4C, CD3G, CCR9, SP110, TNFAIP8, NAP1L1, CXCR4, ARHGEF6, GATA3, SELPLG, SEC31L2, CD3Z, SH2D1A, GZMB, CD1A, SCN3A, LAIR1, AF1Q, TRB@, DOCK2, MLC1, CD3D, T3JAM, CD6, ZAP70, IFI44, GPR65, PRF1, AIF1, WDR45, CD1E, CYFIP2, TARP, TRIM, ARHGAP15, NOTCH1, STAG3, NARF, TM6SF1, UBASH3A, and MGC5566, or wherein the method further comprises measuring a level of expression of at least one gene selected from the group consisting of FLJ10534, PTPRC, TRIM22, C18orf1, TRIM41, LAT, CD1C, MYBBP1A, CD53, FARSLA, PPP2CA, COL5A2, LAPTM5, CD53, CORO1A, PTPRCAP, PTPRC, HEM1, GMFG, ITK, CD1B, GMFG, PTPRCAP, PTPRC, CD53, CORO1A, HEM1, TCF7, PTPRC, HCLS1, ATP2A3, MYBL1, and FARSLA, or wherein the method further comprises measuring a level of expression of at least one microRNA selected from the group consisting of hsa-mir-124a-3-prec, Hcd768, HUMTRF, hsa-mir-2,3-prec, hsa-mir-181b-prec, Hcd783, hsa-mir-2,2-prec, hsa-mir-124a-1-prec1, hsa-mir-342, hsa-mir-142-prec, HSHELA01, hsa-mir-223-prec, and Hcd754, wherein said level of expression of said gene or microRNA indicates that said cell is sensitive to Teniposide.

54. The method of claim 1, wherein said at least one gene is selected from the group consisting of ALDOC, C1QR1, SLA, WBSCR20A, MFNG, SELL, MYB, RHOH, ZNFN1A1, LCP2, MAP4K1, CBFA2T3, LCP1, SELPLG, CD3Z, LAIR1, WBSCR20C, CD3D, GPR65, ARHGAP15, FLJ10178, NARF, and PUS3, or wherein the method further comprises measuring a level of expression of at least one gene selected from the group consisting of PTPRC, MYBBP1A, ICAM3, CD53, FARSLA, CD53, PTPRCAP, PTPRC, HEM1, GMFG, GMFG, PTPRCAP, PTPRC, CD53, HEM1, PTPRC, HCLS1, PRKCB1, PRKCB1, MYBL1, and FARSLA, or wherein the method further comprises measuring a level of expression of at least one microRNA selected from the group consisting of hsa-mir-025-prec, hsa-mir-007-1-prec, hsa-mir-093-prec-7.1=093-1, Hcd794, and hsa-mir-142-prec, wherein said level of expression of said gene or microRNA indicates that said cell is sensitive to Dactinomycin.

55. The method of claim 1, wherein said at least one gene is selected from the group consisting of PPIB, ZFP36L2, IFI30, USP7, SRM, SH3BP5, ALDOC, FADS2, GUSB, PSCD1, IQGAP2, STS, MFNG, FLI1, PIM2, INPP4A, LRMP, ICAM2, EVI2A, MAL, BTN3A3, PTPN7, IL10RA, SPI1, TRAF1, ITGB7, ARHGAP6, MAP4K1, CD28, PTP4A3, LTB, C1orf38, WBSCR22, CD8B1, LCP1, FLJ13052, MEF2C, PSCDBP, IL16, SELPLG, MAGEA9, LAIR1, TNFRSF25, EVI2B, IGJ, PDCD4, RASA4, HA-1, PLCL2, RNASE6, WBSCR20C, NUP210, RPL10L, C11orf2, CABC1, ARHGEF3, TAPBPL, CHST12, FKBP11, FLJ35036, MYLIP, TXNDC5, PACAP, TOSO, PNAS-4, IL21R, and TCF4, or wherein the method further comprises measuring a level of expression of at least one gene selected from the group consisting of CLTB, BTN3A2, BCL2, SETBP1, ICAM3, BCL2, BCL2, BCL2, CD53, CCND2, CLTB, CLTB, BCL2L11, BTN3A2, CD37, MYCL2, CTSS, LAPTM5, CD53, CORO1A, HEM1, CD53, CORO1A, HEM1, HCLS1, BCL2L11, MYCL1, MYC, and MAN1A1, or wherein the method further comprises measuring a level of expression of at least one microRNA selected from the group consisting of Hcd257, hsa-mir-148-prec, Hcd512, HPR227, Hcd421, MPR203, hsa-mir-0,7-prec, hsa-mir-219-2, hsa-mir-328, Hcd783, Hcd181, HPR213, hsa-mir-191-prec, hsa-mir-375, hsa-mir-2,2-prec, Hcd913, Hcd716, MPR207, HPR206, hsa-mir-016b-chr3, Hcd654, hsa-mir-195-prec, Hcd425, hsa-mir-148a, hsa-mir-142-prec, and hsa-mir-016a-chr13, wherein said level of expression of said gene or microRNA indicates that said cell is sensitive to Tretinoin.

56. The method of claim 1, wherein said at least one gene is selected from the group consisting of PDGFRB, KDR, KIT, and FLT3, or wherein the method further comprises measuring a level of expression of at least one gene selected from the group consisting of FLT1, FLT4, PDGFRA, and CSF1R, wherein said level of expression of said gene indicates that said cell is sensitive to sunitinib.

57. The method of claim 1, wherein said at least one gene is BCL2, wherein said level of expression of said gene indicates that said cell is sensitive to SPC2996.

58. The method of claim 1, wherein said at least one gene is selected from the group consisting of ARHGDIB, ZFP36L2, ITM2A, LGALS9, INPP5D, SATB1, TFDP2, IL2RG, CD48, SELL, ADA, LRMP, RIMS3, LCK, CXorf9, RHOH, ZNFN1A1, LCP2, CD1D, CD2, ZNF91, MAP4K1, CCR7, IGLL1, CD3G, ZNF430, CCR9, CXCR4, KIAA0922, TARP, FYN, SH2D1A, CD1A, LST1, LAIR1, TRB@, SEPT6, CD3D, CD6, AIF1, CD1E, TRIM, GLTSCR2, ARHGAP15, BIN2, SH3TC1, CECR1, BCL11B, GIMAP6, STAG3, GALNT6, MGC5566, PACAP, and LEF1, or wherein the method further comprises measuring a level of expression of at least one gene selected from the group consisting of CD27BP, TRIM22, TRA@, C18orf1, EVL, PRKCH, TRIM41, PSCD2L, CD1C, ADAM11, ABCD2, CD24, CD29, CD37, GNA15, LAPTM5, CORO1A, HEM1, GMFG, GNA15, CD1B, GMFG, CORO1A, HEM1, GNA15, ITGB2, PRKCB1, ATP2A3, and PRKCB1, or wherein the method further comprises measuring a level of expression of at least one microRNA selected from the group consisting of hsa-mir-092-prec-X=092-2, hsa-mir-181b-2, Hcd417, Hcd440_HPR257, hsa-mir-019b-2-prec, hsa-mir-2,3-prec, hsa-mir-033-prec, hsa-mir-092-prec-13=092-1, hsa-mir-181b-prec, hsa-mir-128b-prec, hsa-mir-526a-2, MPR95, HPR220, hsa-mir-133a-1, hsa-mir-148a, hsa-mir-142-prec, HPR169, hsa-mir-223-prec, hsa-mir-018-prec, hsa-mir-020-prec, and hsa-mir-484, wherein said level of expression of said gene or microRNA indicates that said cell is sensitive to Ifosfamide.

59. The method of claim 1, wherein said at least one gene is selected from the group consisting of MLP, GLUL, SLC9A3R1, ZFP36L2, INSIG1, TBL1X, NDUFAB1, EBP, TRIM14, SRPK2, PMM2, CLDN3, GCH1, ID11, TTF1, MYB, RASGRP1, HIST1H3H, CBFA2T3, SRRM2, ANAPC5, MBD4, GATA3, H1ST1H2BG, RAB14, PIK3R1, MGC50853, ELF1, ZRF1, ZNF394, S100A14, SLC6A14, GALNT6, SPDEF, TPRT, and CALML4, or wherein the method further comprises measuring a level of expression of at least one gene selected from the group consisting of EIF4A1, TFF1, TFF1, MYBBP1A, AKAP1, DGKZ, EIF4A1, KIAA0182, SLC19A1, ATP2A3, MYBL1, EIF4EBP2, G1P2, and MAN1A1, or wherein the method further comprises measuring a level of expression of at least one microRNA selected from the group consisting of hsa-mir-092-prec-X=092-2, Hcd547, Hcd257, hsa-mir-148-prec, HUMTRS, hsa-mir-033-prec, hsa-mir-092-prec-13=092-1, hsa-mir-375, hsa-mir-095-prec-4, hsa-mir-025-prec, hsa-mir-202-prec, hsa-mir-007-1-prec, hsa-mir-093-prec-7.1=093-1, hsa-mir-106-prec-X, hsa-mir-142-prec, hsa-mir-223-prec, and hsa-mir-018-prec, wherein said level of expression of said gene or microRNA indicates that said cell is sensitive to Tamoxifen.

60. The method of claim 1, wherein said at least one gene is selected from the group consisting of CSDA, F8A1, KYNU, PHF14, SERPINB2, OPHN1, HRMT1L2, TNFRSF1A, PPP4C, CES1, TP53AP1, TM4SF4, RPL5, BC008967, TLK2, COL4A6, PAK3, RECK, LOC51321, MST4, DERP6, SCD4, and FLJ22800, or wherein the method further comprises measuring a level of expression of at least one gene selected from the group consisting of STC2, BAX, CDKN1A, DDB2, RGS2, BAX, BAX, RPL13, RPL13, CDKN1A, and GABPB2, or wherein the method further comprises measuring a level of expression of at least one microRNA selected from the group consisting of HUMTRF, HUMTRN, hsa-mir-124a-1-prec1, hsa-mir-150-prec, Hcd923, HPR181, Hcd569, hsa-mir-199a-2-prec, Hcd754, and hsa-mir-4323p, wherein said level of expression of said gene or microRNA indicates that said cell is sensitive to Floxuridine.

61. The method of claim 1, wherein said at least one gene is selected from the group consisting of CSDA, UBE2L6, TAP1, RPS19, SERPINA1, C1QR1, SLA, GPSM3, PSMB9, EDG1, FMNL1, PTPN7, ZNFN1A1, CENTB1, BATF, MAP4K1, PDE4C, SP110, HLA-DRA, IFI16, HLA-DRB1, ARHGEF6, SELPLG, SEC31L2, CD3Z, PRKCQ, SH2D1A, GZMB, TRB@, HLA-DPA1, AIM1, DOCK2, CD3D, IFITM1, ZAP70, PRF1, C1orf24, ARHGAP15, C13orf18, and TM6SF1, or wherein the method further comprises measuring a level of expression of at least one gene selected from the group consisting of PTPRC, TRIM22, PSME2, LAT, METAP1, CD53, FARSLA, RPL13, RAC2, RPL13, PTMA, CD53, CORO1A, PTPRCAP, PTPRC, GMFG, ITK, GMFG, PTPRCAP, PTPRC, CD53, CORO1A, ITGB2, PTPRC, HCLS1, and FARSLA, or wherein the method further comprises measuring a level of expression of at least one microRNA selected from the group consisting of HUMTRF, hsa-mir-380-5p, hsa-mir-342, hsa-mir-142-prec, and Hcd200, wherein said level of expression of said gene or microRNA indicates that said cell is sensitive to Irinotecan.

62. The method of claim 1, wherein said at least one gene is selected from the group consisting of STAT1, HSBP1, IFI30, RIOK3, TNFSF10, ALOX5AP, ADFP, IRS2, EFEMP2, RIPK2, DKFZp56411922, MT1K, RNASET2, EFHD2, TRIB3, ACSL5, IFIH1, and DNAPTP6, or wherein the method further comprises measuring a level of expression of at least one gene selected from the group consisting of IFI27, OPTN, C20orf18, FN1, LOC51123, FN1, OPTN, and OPTN, or wherein the method further comprises measuring a level of expression of at least one microRNA selected from the group consisting of Hcd289, Hcd939, Hcd330, HPR76, Hcd111, Hcd976, hsa-mir-15a, hsa-mir-001b-1-prec1, hsa-mir-450-1, hsa-mir-200b, Hcd578, and hsa-mir-200a-prec, wherein said level of expression of said gene or microRNA indicates that said cell is sensitive to Satraplatin.

63. The method of claim 1, wherein said level of expression of said gene is determined by detecting the level of mRNA transcribed from said gene.

64. The method of claim 1, wherein said level of expression of said gene is determined by detecting the level of a protein product of said gene.

65. The method of claim 1, wherein said level of expression of said gene is determined by detecting the level of the biological activity of a protein product of said gene.

66. The method of claim 1, wherein an increase in the level of expression of said gene or microRNA indicates increased sensitivity of said cell to said treatment.

67. The method of claim 1, wherein said cell is a cancer cell.

68. The method of claim 1, wherein a decrease in the level of expression of said gene or microRNA indicates increased sensitivity of said cell to said treatment.

69. The method of claim 1, wherein said level of expression of said gene or microRNA is measured using a quantitative reverse transcription-polymerase chain reaction (qRT-PCR).

70. A method for determining the development of resistance of a cell in a patient to a treatment to which said cell in said patient has previously been sensitive, said method comprising measuring a level of expression of at least one gene or microRNA of claim 1 of said cell, wherein a decrease in said level of expression of said gene or microRNA in said cell relative to the level of expression of said gene or microRNA in a control cell sensitive to said treatment indicates resistance or a propensity to develop resistance to the treatment by said patient.

71. A method for determining the development of resistance of a cell in a patient to a treatment to which said cell in said patient has previously been sensitive, said method comprising measuring a level of expression of at least one gene or microRNA of claim 1 in said cell, wherein an increase in said level of expression of said gene or microRNA in said cell relative to the level of expression of said gene or microRNA in a control cell sensitive to said treatment indicates resistance or a propensity to develop resistance to the treatment by said patient.

72. A method of determining sensitivity of a cancer patient to a treatment for cancer comprising measuring a level of expression of at least one microRNA in a cell of said patient, said microRNA selected from the group consisting of ath-MIR180aNo2, Hcd102 left, Hcd111 left, Hcd115 left, Hcd120 left, Hcd142 right, Hcd145 left, Hcd148_HPR225 left, Hcd181 left, Hcd181 right, Hcd210_HPR205 right, Hcd213_HPR182 left, Hcd230 left, Hcd243 right, Hcd246 right, Hcd248 right, Hcd249 right, Hcd250 left, Hcd255 left, Hcd257 left, Hcd257 right, Hcd263 left, Hcd266 left, Hcd270 right, Hcd279 left, Hcd279 right, Hcd28_HPR39left, Hcd28_HPR39right, Hcd282PO right, Hcd289 left, Hcd294 left, Hcd318 right, Hcd323 left, Hcd330 right, Hcd338 left, Hcd340 left, Hcd350 right, Hcd355_HPR190 left, Hcd361 right, Hcd366 left, Hcd373 right, Hcd383 left, Hcd383 right, Hcd384 left, Hcd397 left, Hcd404 left, Hcd412 left, Hcd413 right, Hcd415 right, Hcd417 right, Hcd421 right, Hcd425 left, Hcd438right, Hcd434 right, Hcd438 left, Hcd440_HPR257 right, Hcd444 right, Hcd447 right, Hcd448 left, Hcd498 right, Hcd503 left, Hcd511 right, Hcd512 left, Hcd514 right, Hcd517 left, Hcd517 right, Hcd530 right, Hcd536_HPR104 right, Hcd542 left, Hcd544 left, Hcd547 left, Hcd559 right, Hcd562 right, Hcd569 right, Hcd570 right, Hcd578 right, Hcd581 right, Hcd586 left, Hcd586 right, Hcd587 right, Hcd605 left, Hcd605 left, Hcd605 right, Hcd608 right, Hcd627 left, Hcd631 left, Hcd631 right, Hcd634 left, Hcd642 right, Hcd649 right, Hcd654 left, Hcd658 right, Hcd669 right, Hcd674 left, Hcd678 right, Hcd683 left, Hcd684 right, Hcd689 right, Hcd690 right, Hcd691 right, Hcd693 right, Hcd697 right, Hcd704 left, Hcd704 left, Hcd712 right, Hcd716 right, Hcd731 left, Hcd738 left, Hcd739 right, Hcd739 right, Hcd749 right, Hcd753 left, Hcd754 left, Hcd755 left, Hcd760 left, Hcd763 right, Hcd768 left, Hcd768 right, Hcd770 left, Hcd773 left, Hcd777 left, Hcd778 right, Hcd781 left, Hcd781 right, Hcd782 left, Hcd783 left, Hcd788 left, Hcd794 right, Hcd796 left, Hcd799 left, Hcd807 right, Hcd812 left, Hcd817 left, Hcd817 right, Hcd829 right, Hcd852 right, Hcd861 right, Hcd863PO right, Hcd866 right, Hcd869 left, Hcd873 left, Hcd886 right, Hcd889 right, Hcd891 right, Hcd892 left, Hcd913 right, Hcd923 left, Hcd923 right, Hcd938 left, Hcd938 right, Hcd939 right, Hcd946 left, Hcd948 right, Hcd960 left, Hcd965 left, Hcd970 left, Hcd975 left, Hcd976 right, Hcd99 right, HPR100 right, HPR129 left, HPR154 left, HPR159 left, HPR163 left, HPR169 right, HPR172 right, HPR181 left, HPR187 left, HPR199 right, HPR206 left, HPR213 right, HPR214 right, HPR220 left, HPR220 right, HPR227 right, HPR232 right, HPR233 right, HPR244 right, HPR262 left, HPR264 right, HPR266 right, HPR271 right, HPR76 right, hsa_mir_{—}490_Hcd20 right, HSHELA01, HSTRNL, HUMTRAB, HUMTRF, HUMTRN, HUMTRS, HUMTRV1A, let-7f-2-prec2, mir-001b-1-prec1, mir-001b-2-prec, mir-007-1-prec, mir-007-2-precNo2, mir-010a-precNo1, mir-015b-precNo2, mir-016a-chr13, mir-016b-chr3, mir-017-precNo1, mir-017-precNo2, mir-018-prec, mir-019a-prec, mir-019b-1-prec, mir-019b-2-prec, mir-020-prec, mir-022-prec, mir-023a-prec, mir-023b-prec, mir-024-2-prec, mir-025-prec, mir-027b-prec, mir-029c-prec, mir-032-precNo2, mir-033b-prec, mir-033-prec, mir-034-precNo1, mir-034-precNo2, mir-092-prec-13=092-1No2, mir-092-prec-X=092-2, mir-093-prec-7.1=093-1, mir-095-prec-4, mir-096-prec-7No1,mir-096-prec-7No2, mir-098-prec-X, mir-099b-prec-19No1, mir-100-1/2-prec, mir-100No1, mir-101-prec-9, mir-102-prec-1, mir-103-2-prec, mir-103-prec-5=103-1, mir-106aNo1, mir-106-prec-X, mir-107No1, mir-107-prec-10, mir-122a-prec, mir-123-precNo1, mir-123-precNo2, mir-124a-1-prec1, mir-124a-2-prec, mir-124a-3-prec, mir-125b-1, mir-125b-2-precNo2, mir-127-prec, mir-128b-precNo1, mir-128b-precNo2, mir-133a-1, mir-135-2-prec, mir-136-precNo2, mir-138-1-prec, mir-140No2, mir-142-prec, mir-143-prec, mir-144-precNo2, mir-145-prec, mir-146bNo1, mir-146-prec, mir-147-prec, mir-148aNo1, mir-148-prec, mir-149-prec, mir-150-prec, mir-153-1-prec1, mir-154-prec1No1, mir-155-prec, mir-15aNo1, mir-16-1No1, mir-16-2No1, mir-181a-precNo1, mir-181b-1No1, mir-181b-2No1, mir-181b-precNo1, mir-181b-precNo2, mir-181c-precNo1, mir-181dNo1, mir-188-prec, mir-18bNo2, mir-191-prec, mir-192No2, mir-193bNo2, mir-194-2No1, mir-195-prec, mir-196-2-precNo2, mir-197-prec, mir-198-prec, mir-199a-1-prec, mir-199a-2-prec, mir-199b-precNo1, mir-200a-prec, mir-200bNo1, mir-200bNo2, mir-202*, mir-202-prec, mir-204-precNo2, mir-205-prec, mir-208-prec, mir-20bNo1, mir-2,2-precNo1, mir-2,2-precNo2, mir-2,3-precNo1, mir-2,4-prec, mir-2,5-precNo2, mir-2,6-precNo1, mir-219-2No1, mir-2,9-prec, mir-223-prec, mir-29b-1No1, mir-29b-2=102prec7.1=7.2, mir-321No1, mir-321No2, mir-324No1, mir-324No2, mir-328No1, mir-342No1, mir-361No1, mir-367No1, mir-370No1, mir-371No1, miR-373*No1, mir-375, mir-376aNo1, mir-379No1, mir-380-5p, mir-382, mir-384, mir-409-3p, mir-423No1, mir-424No2, mir-429No1, mir-429No2, mir-4323p, mir-4325p, mir-449No1, mir-450-1, mir-450-2No1, mir-483No1, mir-484, mir-487No1, mir-495No1, mir-499No2, mir-501No2, mir-503No1, mir-509No1, mir-514-1No2, mir-515-15p, mir-515-23p, mir-516-33p, mir-516-43p, mir-518e/526c, mir-519a-1/52, mir-519a-2No2, mir-519b, mir-519c/52, mir-520c/52, mir-526a-2No1, mir-526a-2No2, MPR103 right, MPR121 left, MPR121 left, MPR130 left, MPR130 right, MPR133 right, MPR141 left, MPR151 left, MPR156 left, MPR162 left, MPR174 left, MPR174 right, MPR185 right, MPR197 right, MPR203 left, MPR207 right, MPR215 left, MPR216 left, MPR224 left, MPR224 right, MPR228 left, MPR234 right, MPR237 left, MPR243 left, MPR244 right, MPR249 left, MPR254 right, MPR74 left, MPR88 right, and MPR95 left, wherein said level of expression of said microRNA indicates said cell is sensitive to said treatment.

73-136. (canceled)

137. A kit comprising a single-stranded nucleic acid molecule that is substantially complementary to or substantially identical to at least 5 consecutive nucleotides of at least one gene selected from the group consisting of ACTB, ACTN4, ADA, ADAM9, ADAMTS1, ADD1, AF1Q, AIF1, AKAP1, AKAP13, AKR1C1, AKT1, ALDH2, ALDOC, ALG5, ALMS1, ALOX15B, AMIGO2, AMPD2, AMPD3, ANAPC5, ANP32A, ANP32B, ANXA1, AP1G2, APOBEC3B, APRT, ARHE, ARHGAP15, ARHGAP25, ARHGDIB, ARHGEF6, ARL7, ASAH1, ASPH, ATF3, ATIC, ATP2A2, ATP2A3, ATP5D, ATP5G2, ATP6V1B2, BC008967, BCAT1, BCHE, BCL11B, BDNF, BHLHB2, BIN2, BLMH, BMI1, BNIP3, BRDT, BRRN1, BTN3A3, C11orf2, C14orf139, C15orf25, C18orf10, C1orf24, C1orf29, C1orf38, C1QR1, C22orf18, C6orf32, CACNA1G, CACNB3, CALM1, CALML4, CALU, CAP350, CASP2, CASP6, CASP7, CAST, CBLB, CCNA2, CCNB1IP1, CCND3, CCR7, CCR9, CD1A, CD1C, CD1D, CD1E, CD2, CD28, CD3D, CD3E, CD3G, CD3Z, CD44, CD47, CD59, CD6, CD63, CD8A, CD8B1, CD99, CDC10, CDCl₄B, CDH11, CDH2, CDKL5, CDKN2A, CDW52, CECR1, CENPB, CENTB1, CENTG2, CEP1, CG018, CHRNA3, CHS1, CIAPIN1, CKAP4, CKIP-1, CNP, COL4A1, COL5A2, COL6A1, CORO1C, CRABP1, CRK, CRY1, CSDA, CTBP1, CTSC, CTSL, CUGBP2, CUTC, CXCL1, CXCR4, CXorf9, CYFIP2, CYLD, CYR61, DATF1, DAZAP1, DBN1, DBT, DCTN1, DDX18, DDX5, DGKA, DIAPH1, DKC1, DKFZP434J154, DKFZP564C186, DKFZP564G2022, DKFZp564J157, DKFZP564K0822, DNAJC10, DNAJC7, DNAPTP6, DOCK10, DOCK2, DPAGT1, DPEP2, DPYSL3, DSIPI, DUSP1, DXS9879E, EEF1B2, EFNB2, EHD2, EIF5A, ELK3, ENO2, EPAS1, EPB41L4B, ERCC2, ERG, ERP70, EVER1, EVI2A, EVL, EXT1, EZH2, F2R, FABP5, FAD104, FAM46A, FAU, FCGR2A, FCGR2C, FER1L3, FHL1, FHOD1, FKBP1A, FKBP9, FLJ10350, FLJ10539, FLJ10774, FLJ12270, FLJ13373, FLJ20859, FLJ21159, FLJ22457, FLJ35036, FLJ46603, FLNC, FLOT1, FMNL1, FNBP1, FOLH1, FOXF2, FSCN1, FTL, FYB, FYN, GOS2, G6PD, GALIG, GALNT6, GATA2, GATA3, GFPT1, GIMAP5, GIT2, GJA1, GLRB, GLTSCR2, GLUL, GMDS, GNAQ, GNB2, GNB5, GOT2, GPR65, GPRASP1, GPSM3, GRP58, GSTM2, GTF3A, GTSE1, GZMA, GZMB, H1F0, H1FX, H2AFX, H3F3A, HA-1, HEXB, HIC, HIST1H4C, HK1, HLA-A, HLA-B, HLA-DRA, HMGA1, HMGN2, HMMR, HNRPA1, HNRPD, HNRPM, HOXA9, HRMT1L1, HSA9761, HSPA5, HSU79274, HTATSF1, ICAM1, ICAM2, IER3, IFI16, IFI44, IFITM2, IFITM3, IFRG28, IGFBP2, IGSF4, IL13RA2, IL21R, IL2RG, IL4R, IL6, IL6R, IL6ST, IL8, IMPDH2, INPP5D, INSIG1, IQGAP1, IQGAP2, IRS2, ITGA5, ITM2A, JARID2, JUNB, K-ALPHA-1, KHDRBS1, KIAA0355, KIAA0802, KIAA0877, KIAA0922, KIAA1078, KIAA1128, KIAA1393, KIFC1, LAIR1, LAMB1, LAMB3, LAT, LBR, LCK, LCP1, LCP2, LEF1, LEPRE1, LGALS1, LGALS9, LHFPL2, LNK, LOC54103, LOC55831, LOC81558, LOC94105, LONP, LOX, LOXL2, LPHN2, LPXN, LRMP, LRP12, LRRC5, LRRN3, LST1, LTB, LUM, LY9, LY96, MAGEB2, MAL, MAP1B, MAP1LC3B, MAP4K1, MAPK1, MARCKS, MAZ, MCAM, MCL1, MCM5, MCM7, MDH2, MDN1, MEF2C, MFNG, MGC17330, MGC21654, MGC2744, MGC4083, MGC8721, MGC8902, MGLL, MLPH, MPHOSPH6, MPP1, MPZL1, MRP63, MRPS2, MT1E, MT1K, MUF1, MVP, MYB, MYL9, MYO1B, NAP1L1, NAP1L2, NARF, NASP, NCOR2, NDN, NDUFAB1, NDUFS6, NFKBIA, NID2, NIPA2, NME4, NME7, NNMT, NOL5A, NOL8, NOMO2, NOTCH1, NPC1, NQO1, NR1D2, NUDC, NUP210, NUP88, NVL, NXF1, OBFC1, OCRL, OGT, OXA1L, P2RX5, P4HA1, PACAP, PAF53, PAFAH1B3, PALM2-AKAP2, PAX6, PCBP2, PCCB, PFDN5, PFN1, PFN2, PGAM1, PHEMX, PHLDA1, PIM2, PITPNC1, PLAC8, PLAGL1, PLAUR, PLCB1, PLEK2, PLEKHC1, PLOD2, PLSCR1, PNAS-4, PNMA2, POLR2F, PPAP2B, PRF1, PRG1, PRIM1, PRKCH, PRKCQ, PRKD2, PRNP, PRP19, PRPF8, PRSS23, PSCDBP, PSMB9, PSMC3, PSME2, PTGER4, PTGES2, PTOV1, PTP4A3, PTPN7, PTPNS1, PTRF, PURA, PWP1, PYGL, QKI, RAB3GAP, RAB7L1, RAB9P40, RAC2, RAFTLIN, RAG2, RAP1B, RASGRP2, RBPMS, RCN1, RFC3, RFC5, RGC32, RGS3, RHOH, RIMS3, RIOK3, RIPK2, RIS1, RNASE6, RNF144, RPL10, RPL10A, RPL12, RPL13A, RPL17, RPL18, RPL36A, RPLP0, RPLP2, RPS15, RPS19, RPS2, RPS4X, RPS4Y1, RRAS, RRAS2, RRBP1, RRM2, RUNX1, RUNX3, S100A4, SART3, SATB1, SCAP1, SCARB1, SCN3A, SEC31L2, SEC61G, SELL, SELPLG, SEMA4G, SEPT10, SEPT6, SERPINA1, SERPINB1, SERPINB6, SFRS5, SFRS6, SFRS7, SH2D1A, SH3GL3, SH3TC1, SHD1, SHMT2, SIAT1, SKB1, SKP2, SLA, SLC1A4, SLC20A1, SLC25A15, SLC25A5, SLC39A14, SLC39A6, SLC43A3, SLC4A2, SLC7A11, SLC7A6, SMAD3, SMOX, SNRPA, SNRPB, SOD2, SOX4, SP140, SPANXC, SPI1, SRF, SRM, SSA2, SSBP2, SSRP1, SSSCA1, STAG3, STAT1, STAT4, STAT5A, STC1, STC2, STOML2, T3JAM, TACC1, TACC3, TAF5, TAL1, TAP1, TARP, TBCA, TCF12, TCF4, TFDP2, TFPI, TIMM17A, TIMP1, TJP1, TK2, TM4SF1, TM4SF2, TM4SF8, TM6SF1, TMEM2, TMEM22, TMSB10, TMSNB, TNFAIP3, TNFAIP8, TNFRSF10B, TNFRSF1A, TNFRSF7, TNIK, TNPO1, TOB1, TOMM20, TOX, TPK1, TPM2, TRA@, TRA1, TRAM2, TRB@, TRD@, TRIM, TRIM14, TRIM22, TRIM28, TRIP13, TRPV2, TUBGCP3, TUSC3, TXN, TXNDC5, UBASH3A, UBE2A, UBE2L6, UBE2S, UCHL1, UCK2, UCP2, UFD1L, UGDH, ULK2, UMPS, UNG, USP34, USP4, VASP, VAV1, VLDLR, VWF, WASPIP, WBSCR20A, WBSCR20C, WHSC1, WNT5A, ZAP70, ZFP36L1, ZNF32, ZNF335, ZNF593, ZNFN1A1, and ZYX, wherein said single-stranded nucleic acid molecule allows detection of a level of expression of said gene when said single-stranded nucleic acid molecule is contacted with a nucleic acid molecule expressed from said gene, or its complement, under conditions allowing hybridization to occur between said single-stranded nucleic acid molecule and said nucleic acid molecule expressed from said gene, said kit further comprising instructions for applying nucleic acids collected from a sample from a cancer patient, instructions for measuring the level of expression of said gene, and instructions for determining said cell's sensitivity to a treatment for cancer.

138-204. (canceled)

205. A kit comprising a single-stranded nucleic acid molecule that is substantially complementary to or substantially identical to at least 5 consecutive nucleotides of at least one microRNA selected from the group consisting of ath-MIR180aNo2, Hcd102 left, Hcd111 left, Hcd115 left, Hcd120 left, Hcd142 right, Hcd145 left, Hcd148_HPR225 left, Hcd181 left, Hcd181 right, Hcd210_HPR205 right, Hcd213_HPR182 left, Hcd230 left, Hcd243 right, Hcd246 right, Hcd248 right, Hcd249 right, Hcd250 left, Hcd255 left, Hcd257 left, Hcd257 right, Hcd263 left, Hcd266 left, Hcd270 right, Hcd279 left, Hcd279 right, Hcd28_HPR39left, Hcd28_HPR39right, Hcd282PO right, Hcd289 left, Hcd294 left, Hcd318 right, Hcd323 left, Hcd330 right, Hcd338 left, Hcd340 left, Hcd350 right, Hcd355_HPR190 left, Hcd361 right, Hcd366 left, Hcd373 right, Hcd383 left, Hcd383 right, Hcd384 left, Hcd397 left, Hcd404 left, Hcd412 left, Hcd413 right, Hcd415 right, Hcd417 right, Hcd421 right, Hcd425 left, Hcd438right, Hcd434 right, Hcd438 left, Hcd440_HPR257 right, Hcd444 right, Hcd447 right, Hcd448 left, Hcd498 right, Hcd503 left, Hcd511 right, Hcd512 left, Hcd514 right, Hcd517 left, Hcd517 right, Hcd530 right, Hcd536_HPR104 right, Hcd542 left, Hcd544 left, Hcd547 left, Hcd559 right, Hcd562 right, Hcd569 right, Hcd570 right, Hcd578 right, Hcd581 right, Hcd586 left, Hcd586 right, Hcd587 right, Hcd605 left, Hcd605 left, Hcd605 right, Hcd608 right, Hcd627 left, Hcd631 left, Hcd631 right, Hcd634 left, Hcd642 right, Hcd649 right, Hcd654 left, Hcd658 right, Hcd669 right, Hcd674 left, Hcd678 right, Hcd683 left, Hcd684 right, Hcd689 right, Hcd690 right, Hcd691 right, Hcd693 right, Hcd697 right, Hcd704 left, Hcd704 left, Hcd712 right, Hcd716 right, Hcd731 left, Hcd738 left, Hcd739 right, Hcd739 right, Hcd749 right, Hcd753 left, Hcd754 left, Hcd755 left, Hcd760 left, Hcd763 right, Hcd768 left, Hcd768 right, Hcd770 left, Hcd773 left, Hcd777 left, Hcd778 right, Hcd781 left, Hcd781 right, Hcd782 left, Hcd783 left, Hcd788 left, Hcd794 right, Hcd796 left, Hcd799 left, Hcd807 right, Hcd812 left, Hcd817 left, Hcd817 right, Hcd829 right, Hcd852 right, Hcd861 right, Hcd863PO right, Hcd866 right, Hcd869 left, Hcd873 left, Hcd886 right, Hcd889 right, Hcd891 right, Hcd892 left, Hcd913 right, Hcd923 left, Hcd923 right, Hcd938 left, Hcd938 right, Hcd939 right, Hcd946 left, Hcd948 right, Hcd960 left, Hcd965 left, Hcd970 left, Hcd975 left, Hcd976 right, Hcd99 right, HPR100 right, HPR129 left, HPR154 left, HPR159 left, HPR163 left, HPR169 right, HPR172 right, HPR181 left, HPR187 left, HPR199 right, HPR206 left, HPR213 right, HPR214 right, HPR220 left, HPR220 right, HPR227 right, HPR232 right, HPR233 right, HPR244 right, HPR262 left, HPR264 right, HPR266 right, HPR271 right, HPR76 right, hsa_mir_{—}490_Hcd20 right, HSHELA01, HSTRNL, HUMTRAB, HUMTRF, HUMTRN, HUMTRS, HUMTRV1A, let-7f-2-prec2, mir-001b-1-prec1, mir-001b-2-prec, mir-007-1-prec, mir-007-2-precNo2, mir-010a-precNo1, mir-015b-precNo2, mir-016a-chr13, mir-016b-chr3, mir-017-precNo1, mir-017-precNo2, mir-018-prec, mir-019a-prec, mir-019b-1-prec, mir-019b-2-prec, mir-020-prec, mir-022-prec, mir-023a-prec, mir-023b-prec, mir-024-2-prec, mir-025-prec, mir-027b-prec, mir-029c-prec, mir-032-precNo2, mir-033b-prec, mir-033-prec, mir-034-precNo1, mir-034-precNo2, mir-092-prec-13=092-1No2, mir-092-prec-X=092-2, mir-093-prec-7.1=093-1, mir-095-prec-4, mir-096-prec-7No1, mir-096-prec-7No2, mir-098-prec-X, mir-099b-prec-19No1, mir-100-1/2-prec, mir-100No1, mir-101-prec-9, mir-102-prec-1, mir-103-2-prec, mir-103-prec-5=103-1, mir-106aNo1, mir-106-prec-X, mir-107No1, mir-107-prec-10, mir-122a-prec, mir-123-precNo1, mir-123-precNo2, mir-124a-1-prec1, mir-124a-2-prec, mir-124a-3-prec, mir-125b-1, mir-125b-2-precNo2, mir-127-prec, mir-128b-precNo1, mir-128b-precNo2, mir-133a-1, mir-135-2-prec, mir-136-precNo2, mir-138-1-prec, mir-140No2, mir-142-prec, mir-143-prec, mir-144-precNo2, mir-145-prec, mir-146bNo1, mir-146-prec, mir-147-prec, mir-148aNo1, mir-148-prec, mir-149-prec, mir-150-prec, mir-153-1-prec1, mir-154-prec1No1, mir-155-prec, mir-15aNo1, mir-16-1No1, mir-16-2No1, mir-181a-precNo1, mir-181b-1No1, mir-181b-2No1, mir-181b-precNo1, mir-181b-precNo2, mir-181c-precNo1, mir-181dNo1, mir-188-prec, mir-18bNo2, mir-191-prec, mir-192No2, mir-193bNo2, mir-194-2No1, mir-195-prec, mir-196-2-precNo2, mir-197-prec, mir-198-prec, mir-199a-1-prec, mir-199a-2-prec, mir-199b-precNo1, mir-200a-prec, mir-200bNo1, mir-200bNo2, mir-202*, mir-202-prec, mir-204-precNo2, mir-205-prec, mir-208-prec, mir-20bNo1, mir-2,2-precNo1, mir-2,2-precNo2, mir-2,3-precNo1, mir-2,4-prec, mir-2,5-precNo2, mir-2,6-precNo1, mir-219-2No1, mir-2,9-prec, mir-223-prec, mir-29b-1No1, mir-29b-2=102prec7.1=7.2, mir-321No1, mir-321No2, mir-324No1, mir-324No2, mir-328No1, mir-342No1, mir-361No1, mir-367No1, mir-370No1, mir-371No1, miR-373*No1, mir-375, mir-376aNo1, mir-379No1, mir-380-5p, mir-382, mir-384, mir-409-3p, mir-423No1, mir-424No2, mir-429No1, mir-429No2, mir-4323p, mir-4325p, mir-449No1, mir-450-1, mir-450-2No1, mir-483No1, mir-484, mir-487No1, mir-495No1, mir-499No2, mir-501No2, mir-503No1, mir-509No1, mir-514-1No2, mir-515-15p, mir-515-23p, mir-516-33p, mir-516-43p, mir-518e/526c, mir-519a-1/52, mir-519a-2No2, mir-519b, mir-519c/52, mir-520c/52, mir-526a-2No1, mir-526a-2No2, MPR103 right, MPR121 left, MPR121 left, MPR130 left, MPR130 right, MPR133 right, MPR141 left, MPR151 left, MPR156 left, MPR162 left, MPR174 left, MPR174 right, MPR185 right, MPR197 right, MPR203 left, MPR207 right, MPR215 left, MPR216 left, MPR224 left, MPR224 right, MPR228 left, MPR234 right, MPR237 left, MPR243 left, MPR244 right, MPR249 left, MPR254 right, MPR74 left, MPR88 right, and MPR95 left, wherein said single-stranded nucleic acid molecule allows detection of a level of expression of said microRNA when said single-stranded nucleic acid molecule is contacted with said microRNA, or its complement, under conditions allowing hybridization to occur between said single-stranded nucleic acid molecule and said microRNA, said kit further comprising instructions for applying nucleic acids collected from a sample from a cancer patient, instructions for measuring the level of expression of said microRNA, and instructions for determining said cell's sensitivity to a treatment for cancer.

206-269. (canceled)

270. A method of identifying biomarkers useful for the determination of sensitivity of a cancer patient to a treatment for cancer comprising:
a. obtaining pluralities of measurements of the level of expression of a gene or microRNA in different cell types and measurements of the growth of said cell types in the presence of a treatment for cancer relative to the growth of said cell types in the absence of said treatment for cancer;
b. correlating each plurality of measurements of the level of expression of said gene or microRNA in said cells with the growth of said cells to obtain a correlation coefficient;
c. selecting the median correlation coefficient calculated for said gene or microRNA; and
d. identifying said gene or microRNA as a biomarker for use in determining the sensitivity of a cancer patient to said treatment for cancer if said median correlation coefficient exceeds 0.3.

271-280. (canceled)

281. A method of determining sensitivity of a cancer patient to a treatment for cancer comprising:
a. obtaining a measurement of the level of expression of a gene or microRNA in a sample from said cancer patient;
b. applying a model predictive of sensitivity to a treatment for cancer to said measurement, wherein said model is developed using an algorithm selected from the group consisting of linear sums, nearest neighbor, nearest centroid, linear discriminant analysis, support vector machines, and neural networks; and
c. predicting whether or not said cancer patient will be responsive to said treatment for cancer.

282-301. (canceled)
